United States Patent Application Publication US 2015/0354009 A1 - sequence listing, part 9

SEQ ID NO: 205 - DNA, 2220223 bp, Homo sapiens
atgcgaaaggggagctgttggaattcaaatagactttctggttcccagcagtcggcagtaatagaatgctttcaggaagatgacagaatcaggagaaagatgctgttttgcactatcttgatttgttacagcagccaacttattggcatgatggagtgacaggaaaaacagctggcatggaaggtaggattattaaagctattacatcattacaaatacaattagaagctggccatgacaaagcatatgtttgaacaagcagctgttggtagctggggtttgttgccgagctcttcaaactctgcaaacagtgttgcttttacagaatggattttaaaattgccttgtgctgcgttagattttggggagggggtgtgcttgcctccaacctcaggaaaacacttctgggatagaaatcagtgttagaagattttagaataaagtattgttcaggagtctaggtttcttcaggtagatgatgacagggggaaaaaaatcttcggggaaatctaccccagattagttatatgcaatttagttgcaagaactgattgatgtattggcatattcagacagtgagagaaatgagaatgtacagaatgtttggataggttgaaaattgttatacttggtttctattttataaggagtttggctgtcagtcatttctcctcatcaatttctagcttttgacatttattcagtcattctgcattatatgaagaaaatatatcaatatctcctgcagggtttttcaacaactctagcatctgtttcagctattgaactgtattcacgttttgccaagttgatgtcgacccagctggtctatgatttctcgcttgattactgctcttaatttctctgtatcagcttgtttcagatagggctttgaaggctgttaatgaaaaatgacagaagtgataaattattgaaaatgtgagcatttatttatttatttatttatttatttatttattttgccctttaatgagttttgtcttacattctttcttgcctgcgtacgatttttagaaccctttctctgttttgcaatatttctttcccctacaatcagtggattataattataagtacttttaagcaaatggagcatgagcatggacagtatttggctccaaaaataaagtttttggagaaaggggagcaatttatgctttttgtataaactatgcatcgtttctataacctatcttcacatgctgtcatggggatctgtcagtgactgtaatcagactgaacatattgaaataatctttatcaccactagggtaacaagcaaataaaacattcaaacatttaacaagtgattgtttaaaacagatgttaaataatatagaaatagattttcctaagtgtgaaaagcctgattattaactgtctatgtaatacagaatctttcggctctctacccagtctcctccatagcctgaggagctaaatcatccaagttaatagactatcatatatgtacatctaatatgacctttcagtgtacacagtgctactcgtatgtgctgtgccttttctgtagtaattgtaatatcccagtcagtctggttaaggaacactattggctgttatgtaactttttttctgaatgttagtccatggttttcaattacgtattcctcttagaaagggtgagttaaaaacaacatgtatttaaatatcagtaaattaattagcaagtggtgggctaattacactaggatttctccaaaataattgctaacttctgttttgaaaaatagtcaaggatttggatgactactttttaaccttgaagcatacattaccgtggttgaatatcattcataattcatatatacagcaggaaagaaaatagttttctagatgtatcattttagcagcaaagaatttttttttataatgtggttcaggcactctgattatttccgtttaatacttttaagtactgtagatgcttttgtatagtgtgttacagaacttggttaatctttgggaagctcaaagactgacagaattttgcatccaaatgctacagggttattttgtggttggttgagaaaattcagctctgtctatactgttgtttaaaatacagccctctttggccaatgttacttttcaactttttataaccgttttaagtgaccattcaagactgtaaaaactcttttacactgcatctttagtaggactctccttttgtgaattgtctccttcgaaaaaatgtgagcttccttctagcctcactctcttgttaccatagttacttttaaaagaaggtttttctttttcaatgaagatagcgtactttaaatcagccactggaatccccaaactgtgtttttgtattttttagtttatagtttaggcttgcttcatttgcggttagaaagtgctctgtatttggtcccactgatgaatggattggacagacgctaggtggcaccagctgttgattattaatgaaatcgtaaagtctatatgccacgcacctgaagagcaggcaaacccttattgataaatgcattgtaagagctggaaatgtctgccaatatttcttgctctaaaacagggtcagcctgcagagtgatgagaccacgtgaagtcttcaaatcccaattgcttaatcctgtgtcttctgaagtgctttaaggaagaaaaaacgatgaaggagaaatgcataaaaatagaaggtgtgaaagagaagtgggacacaatgaaatagactgcaaacattttaatatatttttaaatccagaattagtgacttttataaatctatgtgagttttccccaattctctcaaactcagattgttttctctaaggcatttatattctaaaacaattatttatctcttttaggtaaaaattttattgagcatcattattttttaagtaaaaaaatctcccttatttctctttttgtgataagactgtcaagtgaaatttcccacatgagctagagtagctgcctctcaggtgttgctcttcagaaagatgagcaggggaagacactatcggttaagaaatatgctttgaaatgttttgcctgagaagcttgctccatcctattatcctcccattctcatataatccatcttttaagaaggaaaaagcaaataaaaacaaaccacttaagcatgtgcatacacacacacacacacacacacacgctttggaaaaaaaaaaaagtcagaactgtttaaaaagagaaagccacgacaatattttagttggtcctggagttaataaactaaagtgaaaaataggaaggaaagtccataattagattgtggagagtaaataattacttaaaactggaaatatttttccagaaaaatatgcaatattttttcttcactgggagtaactgacaattcctgaagaaggtgagatggtttagaaagagtgcaaagataatatatgctgtgattctccaatgttatctgaaaagtatgtaatatggctagttatcttgattatagcatggactttggtaaagatttttatgatgcccatatggtgaaaatggagaaatatttgctgtttgacataagagtctggtcaataaatcagctggctaaatgaccctgcctgtgatgtatcaattaatgaatcacagtaaaccaggaagagggcctttcacaggactatagcatagttctataaaattggttccatctgacttgaacctaatcttctgtaatgtgccttatgtctctgttcttgaacctacttggcctgtgaaatattaatgtccaaaaactgaaggacgatccagatagcctgtctatctgggaagcagaacaaatacattgaactattagggtaccaaaggattatgaccacctaaaaactgtggtgaggtcaaagagaataattgtaataggaataagtataacatcctaagctaaggttcataaaatcaatctggcaagtacaggacatgagagagttaaagcttagtaataattaattgaataaatcttactgattttgttggtcatcattattatcagtcataattcatatgacatcaaaatacaatgaaacaaagtaatattgttagacatgtatcctgaaaaaggaaatgaaaaaaatgagaacgaattttagaaggatatatatgatataatggtgtgtgtgtgtatatatatgataggtatggtatatgtatatattatatgtggtaatatatacatattttagaaggacaccatgatctaagaggaaccttaacatttgggggtatgttcagtgaaaagtgtctgaatgctaaaaggtcctacaaactataacatttgaggggcatggaaagtactagaaaagtgaaaagttgaagaatacttgaaggaaaaaagtagagaaaattaagctgatttcaaatattcgatgtgctataatgcagaagagggtttagactcacttgcacctctttggtagcaatggaaaagtattcttccagttaatgttgtgagcagagaattgattactttgtgagacactgcactccttattcctaaagtgttcagtgctaagaatggagtttctgcactaaatggaaattgaagaagatgtctgagataatttttaactaagaatctgtgagtccaatcatttcttttaaaaacatgttcttttttttagacatttatttctctgagggtctctactactccactcgcatcatccaggctaggggtcagtaaatgatagtccacattgtcacatctattactgtttgaccagtcatttaaaatggttttcacgtttctgaattgtttcatttcaagaatatttctgacacatgagattatataaaatttcaatttaagagtctatagtttatttggaagacagccacacccatttatttgtttatatgctatataggactcctttcatgctaaaacacagttgagtacttatgacagagaccatgtgggccacaaagcaggaatatttactatctggccctcgataggaaaagtttgctcacctcatctctagactataaagaaattttgttttttgcttattgactcaagtatctaaacaagcaatgtaacagttaaataacagttctataccataaacagaaattgtaaccacccatactacttaagtactagagacttggaaaagtagttcaaatatgcagcctaacagataaagatggtttcatttggctgttagtctattgagataatttacttgttgaggaatgtttatttaatgtttccataaaaaattgaagtctctgcaatcattgacttatatataatatctgcctagtttgactccattaatcttgctgaatttacctatttggtaggattctgttatttttattgctgcttttccgttagtgtatgatttcagtagacttacagaaagggtgaaagtcaatggaaaacaaggtaaagtgagtggaattttcttcttgcagctaccctcttctctcttcgtgggtttatagactctctcagcagctttggaattgcagttttagagacttacttttataacattatgagtgtgttcttgatcaaatatgttctagaagggatcaagataaaacaaatgcactgcactataaaagaacagttaagggttttagtaaatgattgataagacatgctaaatttaagaattagcaatgagttatttatattttcctgaacatagggatatgagaagggattttttttcatgtcataggagaaactataatcaaattctaagcataaagctgagggattctgaatttaccaccaaatattacaatctccatagttccataatgtgcaactaaaatccccacattttttttctagggaaagatataatttctgctcactggtagcgctggaaattcctgtaaaacccataggattcttattgtatttccatgaggatgttcctgagcagctactttgtgatgcctgtctctatggtaacagacacaaggcttaagggtctgaaagaaattcttcctgttggcttaggaatatggagcaatgagggagacccactgaagactataaaactgaggaaaggcaaaagaggcaattgagaaaaagttgtcgtgggggagctttttttgtgtatttgaaaataatttcacaatttcatttgctcttaatatatctctgaatgaaataagaaccaacatacaagtaaagttttacagaaagaaaaaattctgtgaaagtattgttttttaaccatctagtcaattttatgtaattgaagtcacacagattttttctttagttggcttgcctttcgctactcaagaaaagattgcttcttgcctgaaattggtaagaggacggctctacccctggcaaatttagttcttgttactgctatcaaagatcttgatcttttaaaggactttctttttcctgattccaagggtaagaatattgaactctggttcacattactcataatcactgagcttctcagggaattatgaaagtacactagccttccaagatgttcttttttaggtctatttctcttaaagaccagtaataaatagagcaaatagtactgcttatttgaaaattgggtatttcgtaagaggatgctgggtgagagtttgtgtttttacatgttttactttgtttctcttattaaaataacaaaaaagcaaacaaaaagctcctagaagtttaaaaatatttgattttccatttatttgacttcatcttactttcagcttagcaaatagggacacatcacatttgaattgttttagaaaggagataaatatgactctcctttcccttagattcaaagtatatgttcaaggtgtcatcaaatagccaaaagtctttaaaatatttatgctatgtaaatgtccttcaggaaaatataagtcagagggaggagatggccgtcttagtataaagctctcatgtgtatttgcagtgttaacatgagtgttgatgttttatttatcttcttaacatgttatatctgcacatgtcttcatttgttatatgttagggtcaacagaaaaaataataaagttattgcaagtaagcaaaaacttataacctgatcaataaaaattaatattttaggttggaagataaacacatctcaaatgtcattttataagatcaagttaacaaatgttagcatgcttaaagctttagaggaattaaatctttttatggtttattttctgaccttgagaaatttatagactctgtgcagatatatgttttcacaaatttaatccactctatatagatattagtaaaatgtaagacagtgtcttcagtacctgttcacactatctttaaattaaatgaaaaaactcaagttagctgtaatgtttcagtgtctcctttgatagtgttggaaagcaaattttttaaagaaaaccttttttataactccatacattttgacctatagatactaattgcaatataaaatgtgacatctgaataaaacaagaatactttaaatattcaatatatatactacttttgaaaagatgacttaaattataaacatataaattatatgcctaacatgactggcttccaaaaaacttattttcttgagctttggggttacagcctaaagtgcactgcagtaaataagcaaatgggtaaaaatattgtctagacaaaagtaaaactgagatgttcttttgagcaaacgtttatagaggaggtacaggatgacaactggaaacgtaggtggtacgcagagattaattgctgtcaatgtacacctgaaggtaaatggatggtgcttatcaaatttccagaagaaatattgacattatgttgcaatttgaagacagggttatgaatacaaagagctaagggaaaataaacttatcagcatcattcagctctggtcatgacattgttacaactgattataacactcccaggataaaatgtgataaggaccatcatagtctgtttttactagtacagatttcttttatacatgctataagtagaattgttcggtccagcaacaataagctggattattgaaagtgacactaatgctaacctgaaattgtatgggttttaggggagatgtgggactcatttatgttctatgacaagtgtaaaaaggagattaagtaaaagcctgcatgtgatggacacattagtgagtaggaatctcaggttcctctccctttggctgctgacccattcatgggctggttttggtggccacagtggcaggaaacagagtctatttctccattaggtcatccagacaggattagagcccaccaactgaaatgaaaggttgtttctgctgcttttcattcatccaacaaatatttattgataaattctaactgccaggctctgtgctagagcaagatgactaagatacagtccctgaggaatttagagacgaacgtggtttatgtggatgagaagagaaaaatatttacagtgaatagctaagcagagagcaacagcaactgtgaacccagacagtaaagctgacttaggactgagctagaggtttccggagttcctagtgtgagtgatgtggaaaaactggcaagtccatcaaagagcaaaatgataactgaacagaaagaaagcaaatccagtgaaaaatagtaattcaaagtaaagggtaaagcgacatatttgaagtgtcacttgaaataaaaaggagcatgccttccacctgttgctcatcttcactggaatcaaacctagaaggaaaatgtctaggctggtctaaaagccagttgcatacaatgatattaaatatgattaaagctagcatgagcatgaccatgcaaactttcaggaggatttgaaaacagttacctcccattggtagtttatgtacgtctatccctggaaactttttcctatgctatctttagagaccttgtcatattttatctcaatgtctaacactctttaattagaagctacctgaaaatgtttcactcatgtataaagttaaattaatcacagaatcagacctcagaggttacaaaggagggctgaaaggataacatctcagatagaatagatctattgccaaataaacctgtaacaataagaaattgtgttagataatccgtaaggttttatccaatttcaacatcttccaatttaattgatctccagcctcacacccaactcctcctaggaaattaaaaagagacaggtaaacaagatattttctgaagaatcgaatcatccagaaagtcattctctctcaagcagtacattttctaaagaatttaattatcgaaaaaagtctctctctctcctctttctctctcccttcttctgacatatatagatatgcatatatacacatatatgtatatatttatctatatatctatttatatctctgactcgctgaagtaacttagatatataggctaaaggcaaagaaaaattcctcccaacattcattagtaatttccctttatagattaaggaaagtatttctgtcctccttgatttttaaaacattttactgaactataacacgaatatataaaagttcacaaatcaataggtgtccagcttcatgaattttcacagattgggcacaccccagtaattactcaaggcaagaaaagaatattaccagcatccaaaaactttgtcttaccacttcctagtcaatactctcccagaggtaagtggaatactgacatctaacacaccattgattaggacagacagttcctgaaatgtatgtacttgaagccatacagctgtactcttttgtttctggctcctaaatctcaacattctgtttgtgagatctatctaatttgtttcttgtagttgtggtcccataattttcagtgttgtgtagtatgccatcatataaatgtcctataatttacttattccatctactctggatgaacatttaaattgattccatttgtgaactcttaaaaataattccactttgaatattcttgcaaatttactgcacatatgcatgtagttctgttatgtgccaagaagtagaattattaggtcatagaatagtgaaatactcatctttagttgaaaatgccacgtagtttttcaaggtaggtaaacaaagaaccatcattactttatagaagttctggacatgtcaatgcttagcattattagtctttaatttcagcctttctggctgttatactatagtatctcattgtgtttctcatttccatttttttctagtgactaattaatttgagaaccattttttgtgtttattgctcatgtggatgttatctatagtaaggataacatttcctcccaactttcattagtaatttccctttgtagattaaagaaagtaattctatcaacttgatttttaaaatgttttactgaactataacacaaatatataaaagtgcacttttctaatctcatgctcatttttctattgatttacaattttggtttttataggtatgagatctttacatttttatatggtccctacatttattgtatgtgttgcaaacatctagacagatatcttttataggaacttagaatttcaaaacccggagaccattaaagaatatttagtcccatatcttagtttgaaagatgaggaaagtgtgacttatagagaaattgtcatttcttttaagtttcttccagttagtagtaaggccagatacgtaataaaagtctcctgacactgaagtaaagggtttttttctagtaaaccatgtagggtctttagtcttgtctaatactgtgactcaaactccttgtctcttttggaaggccacaaaatgcgtgacatagtaattttaatagcaagtatagagtgatgcgtgattaatctcattgattttgtgaacaaaaatatcttcagctaacaaactgttgtatagcatggccatgcaatatttaaacctgtatgggccgggcgtggtggctcatgcctgtaatcccagcattttgggaggtcgaggtgggtgtatcatgaggtcaggagttcgagaccagcctggccaatatggtgaaaccccatctctactaaaaacacaaaaattaggtgggctcacgtgcctgtagtcccagctactcgggaggctgaggcagaagaatcgcttgaacccaggaggctgaggttgcaatgagtcaagatcgtgccagtgcactccaacctgggtgacagagtgagattctgtctcaaaaaacaaaggaaaacaaaacaaaacaaaaaaaacctatatgttcttttcggcatcagattttatttttcctctttcataactttattattatattcagtttcttttcacatttattcttattacttggatgttcccattccaaatttggttctaattcaaaaagttttcattttctatagtggatgaagaacaacataaattttacaatactttcttttagtgagataaaatttagtttacaaaacataattactagtacattaatatttactatttatttttaacatgctaggtgcagttcatgcgttattttagctaatctttggaacaacccccgccaaaatgttttattatgcctagtttatagatctagaagctgagcctaagtgagattaagctacttgtgaaacagctctaatcagaaccagatctttataagattctatgcatttcactccttccatgatctacttctgtacctgcttggaaggaaattgagttagtgatacagatttgggtcactacctgcctttagttcttctgccatacataggtcttagggataacctctttttccaatatcattaaataattcattttctgtatcttttttttccaaaacggtaattagagaagtcacttcgttggccttgattttattcattgtattgaataaatacaattttctaaatacggaactcttattcatgtgcaacctaaatacggattaggtgagttaatatccagagaccagattattactaaacttttcttgcatttagagactgaacttattataagaatcttttaattctttttagcaacctattccaaggttgattacttctcatgcatattttagttccaaatatttctttctctttcttgttcattggagaagcattccacagatgcctgagaaacaacttgctctcagtctctctatcttctagtccttggctagagtccccttgccacacttccctagcttcatgcagagtagatactcaatagtacttccacttagaaatttaaatccagatgagttacctagcatgctactttcctcttaaggagtaagtgaagcaaatgtttatagttgtttcactgtatgtgaacaaataggaatgtcaataaaacaagtacatttaattcataagtacttgataatcttaattccttaaatgtataaagctttaaaattaacaaaatactttcaagtttaatttattcacataggaaccatatgaggtaagcaaggtaggaagtcttatttcctctttatagagagccatgtaactaatttctcctatttgtatcctaaatttcttttagctctgccatcccccctccatatctcctgacagtcaccaccttagtttagatccccatatctgacttcgaatacactgatagcttcctaatgtaccttccttcttgcttctctccagtttacccttcacaaggctgctaggcttatctctctcaaagacaaaacttaataagttattccactgcttaaagtccacaggtggctttatattatttatagattataattcaaataacttgcatgaagagaaggtactttacaacaatttccctgccatgtgctcagtctaatcttatatccaccatgtgaatgcctcaccctagccatacaaacagttctctgactgtaacacacttccttttcatgtgcctttggaaatgttgactccatcccacagtcataaacaattcttattcacatatatttacttggtacatgctttataatcctccaaaatagtgtagctagtgcctcttctttacttttggctgaatcatgcacccctgtgcatagaatcttcctaatacttgtttcaccacttattttgctgtgatgtacttttcaggttattgatttattcataaactattagtgcctgagggccatgaattctctattctttttttttttttaccctttgcttagctcttctggagggagctactcaagtttaacttaaagtagtaatgagttacacagccagtaagacatttgtttgagtcctaaggtgacatcatttccattgcatccttcttccctctaatattactaaccatagtacacgagcagtactattgtcaagattcctcctcattcagtttagggaaatgcgttgacccaagttaccatttttgtctatttcacaccgtaaaagtcgggatatttagttatgatggtatgatagttaccctacatggtattttaaaggctctatttcctttgtgacttacacatgacctccccagaggtcttaatttaatggaatcatcacctaaaataatagaagagtaaattgacagtttcgtttataaggtacatggattcaggcatattggtaaagtaacacaaagcaaaaatgtggttcttcatttgtcttgtttcatcactaatagaaaatgatggagttcaccaatcacccaattgtactgtgcagcatggttattgtaaagtatacctgaaattaaaagcaaatatctacttccattttttccactgaattttcatcagaaaatgagaactacatactgaaggatttggggttggcgaatagcagatgtataatgccagcaatatgaaagcagagcaaatgcgtgattggtttacagcctcaacttcagtagtactctgcaaagtctgccagcacacaggtgccttgaggctgcaaagagcgtaggaattcagtggatgtatcaaatgatatgagatgttaatacctacttccttctaatgcatagctttgtgatattagaaaattaataaagaagtgaacaaattaattactttataatctcctaaatcttctctgtggaaggaaaatctcaaagatgcattaagtatccagcaaattggttttgaaattatccattattaaaaagcacaattctgtgtaacaggaagccacatgccaagagctatgtatatttaatcatttatgtcgatgctttttgtagcaattctgtttattctctattgacattatatacagtcctttttatacatagtggaatttaatgtgctgtgtttaaaagacacatcaagcctgacagaatccaattgtatacattatacttttaatttattagaaaatgaaatgatcatttgtgggcttatattagccaaagcagaggataaattttattatattaagaaaatcaaatactgtgactacatttacaaacattgtaaacatgacacttgttgcataattaataaatgaacatattgacctttaatataaaacggcatgaaaggaaagggaaggtggaagatataaccacaatcagaagtggaaatgaactcaaaatctgtaactgtatattaaagaaacatgtgattcatgattgcttttttgccttttccattttgaggcaatagtgccatgttgatattcatttgtgctgtcaaattaagggaaaacattgacaatctttaatataacaaagatagagaataaatgcaggtcaaaagtgtgtgggagaataagagaattgatcacattttaagaacaattacccatgtcactgcttaacccaacgtaatgatgtcaaccagtaggatggaagccagcatcaggaagaatcattttccaagcagatggatctgctgatatttttaattgattgaaggagcgttccattatttttaatcaaaaactaatttcaaataaaatggaaacttccatgaagtttgcaaaaatctgtatgcattaaggctcagactaatagaactacaatgttgtgatagttaataatccattatttaattataatgattattgttcttaacacattacacatgggagtttgtgggaactaccctacctttcttgcttctcaggtgagacaaatcattctcctagtggtctcaagtggtactgaacctcattttatcactgatgacatgctcatgaaactcacactgtactggtgttcttttctccgtctcactcacttctttgctgtgcttcctgggatcacctccgaaataagttgctggcactcaaataatttgctcagggtctacttctggtaaaaggcaacccaagacaacatgatattttattattaatagttttcctcatttaattttatatataatcatttttttctgacagggaagtatatttgaggaaataatgagggcaattatcaaaatatgcattggtttgggagttagagaaactgtcagaagtgacacaccaattttgctacatcgtgacttggtaacagtcattaccattctgggccttttattctcttctgaaaaaatggaagcattcgattacaaatcattaaagaataaagaagatagaaagtgatagaaaagataacaaatgttgatcacaccatgtgcaattgcttgatagtagtttccaggagtactataacagactgagactgtatctacttggaactcgtgggataaaataccattatttgatgccgtatgtgctcggcatgaatgcagtgggaaggatagaaaatatttcatatatttgccaactgtagaatatactgtaatagatcaagtttcattttaaaaatacacaggacacatttttttaaaaatctcatatgaaagcccagcaaagaaaagaagaattgaaggtgtagacatcttgaatgaaaacaagaggacgatttgattcaactgccatttattccaactttcaccctataaccccatagacacagctgtagaaaactgagatcttgaagaaagccactgaattagataatatctacgactacttccaactacaaatgtagaaataattgtctttacctactcatcctcagctagaaagcagctaatgggctactttaaatgtgtgatgctttcacaaattaagcaagactgagtacaacaagcacaacaagtccaacagcacaagttttcacaaacagtattggatgtaacaatacatccaaccagtattagatgtaacaaaaattggttaatttcctaatcaattaattaggaaattttattttctaacctgttggttgccagttatgggcttaagatggaagccagcatcaataggtttaaataatacctttgttttaaaaagaagaagtctaattcatagtcaaacatgtgctttggctaagtggctttgttctgggttttgcatgacagctggtgataaattgggaaaatgtgtaagtagcactgtggtaaggataatgttgatgaagatagaatgtttgaggccactttcagggagaataaaaacgacataaagtaatacttaagactgaattttcttagagatgataatctcatcaccaagcctcattttgccattgaaaaatttcttatgaattcaactatcatatttacatcacaatagacagtattataactctttagcatagggattttgctttaacttactttcaaccaatttatatgttaaagctatttatatctctgctgtttcatgaataaagcccagaggtatcttctttcttgactcactgtcatatcttcacatttcatcacatttttgcagttcaaatatcattcacttagtaacactgaaagcatagaaagattaatcagaaatgatttctgccctcaacaagctgacactggttagagtacaaaagccacactgaaagaatatatggagatctatgatctatgatcaatgatctttgaagttactattgtcatttttgggggcaacatgagtcatgcccatatgaaataacaaacttaatcaatgttgtgtgtgttctgagtgctctaccaaccggccacccccacccccccacatctgtctccctctccttggacctttctattctgagacaaaccaatattgaaatgaagccagttaacaaccccacagtggtctctaagtgttcaagtgaaaggaagagtctcacatgtctcatcttaaatgaaaagctagagatgattatgtttagtgaggagggcatgtcaaaagctgagttaggctgaaatctaggcgtcttgcaccagacagttagtcaaggtgtgaatgcaaaggaaaaattattgaaggaaattaaaagtgttacccccatgcacacatgaatgaaaagaaagcaaagcagtcttactgctgatatggataaaatttaaatggtctagacagatcaaaccagccacaatattcccttaaccaagagctaatccagaggaagatcccaactctcttcaattctacgaaggctgagaggtaaggaagctgcagaagaaaagttggaagctagcagaagttggtttatgaagtttaaggaaagaagccacctccaaacataaaagtgcaaggtgaggcagcaagtgcagttggagaagctgcagcaagttatccagaagttctagctaagatcattgataaaagtggttatactaaatgacagattttttatgtagatgaaatagccttctatttgaagaagatgccatctaggattttcatagctagaaaggagaagtcaatgcctggcttcaaagcttcaaaggacagggtgattcttttgctagagtctaatgcagctggtgactttaagttgaagcaatgctcatttaccattctgaaaatcctagggcccttaagaattatgctaaatagacttagcctttgctctataaaagtaacaataaagcctggatgagagcacatctgtttacagcatgatttactgaatattttaagcccggggttgagaccttgtgctcagaaaaatatattttttttttcaaaaatattactgctcattaataatgtagctggtcatccaagagctcatttggagatgtacaaggagactcatgttgttttcatacctgctaatataacatccattctgtagcccatgggtcaaagagtaagttcaacatttatgtctcattatttaagaaatacatttagtaaggttatagctgctgtaaataataaatcttctgatggatatgagcaaaggaaattgaaagccttctgtaaggaattcaccattctagatgccattaataacattcatgattcatcggaggaggtcaaaatatcacatttaacaggagtttagaagaagctgatttcaaccctcatggatgactttaaggagctcaagttgtcactggaagaagtcactggagatatggtgacaatagcaagagaattaaaatgagaagtggagcctgaagatgttgctgaattcctaaaatctcataataaagcgtgaatggatgaggaattgcatctgatggatgagcaaagaaagtgctttcttgagataaaatttacttctggtgaagatgctgagaacattgttgagatgacaacaaaggatttagaatattacacatacttagctgataaagtagtggcagaatttgagaagactgactccaattttgaaagaagttctactgtgagtaaagtgctatcaaacagcagcacatgctacaaagaaatgttttgtgaaagaaagagtcaattgatgcagcaaaattcattgttgtcttattttacaaagttgtcacagtcactcccaccttcagcaaccccaccctgatcaatcagcagccatccacattgaggcaagagcctccactagcaaaaagattacaactcactaaaggctcagatgattgctagcttttttagcaataaattatgtttttgttaaggtatgtacattttttaacataatgctttgcacacttaggctacaaaataatgtaaatataacttttatatacactgggaaaccgaataattcatgtgactcactttattttggtgatctggaactgaacctgcagtatctccaaggtatacctgtacatattcattcaacttttaccctctaacccgcttacttctgtccctgtggctattgctccaacatcatgataaaaacaaaacatcacatagaagtatggcaattgtactaaacgtattgtaccattggcatttggtgtctgtcgtaccatcacaattgagcctcatccttctttgttaacgcttaattcagagaaaattttcattgagattttataaatgagtaatatggctctgattattgccctgtctgactgcttttatctctatacaatattgtgagagttgctaaagagacttctgatgctgccatatatgtaattggatatttttaaattccatacagtcatctaactgacctctcacccactcaccaaaaattacaactcactccatttgcataaagtaaactgtggaaatatatatattttacctttttcaatctaaattattgctcatggagagtctatttcaccacaaacaatgctatatccttaccttaatggagtattacaatgtaattagccatggaaatggaaaaaatgaaagaaactgttatgaacacatcttcccttttaagccaacttgtcagattttgatagaagaaaaactttcaaagtcttcttacgtgagtcaggtcccattttcttatatttgcattctgctagatttacatctgtctatgacgatgatagtaaaggtgataatgatgataaaggttatgcttatgataattcctcataatgggtaactgtaatatcagataatacacgataagatctttaaaagaaagatgacaagtgaatctcataggagttcagagcatggtgaggatggccctgatttttcatttctgtctctctagtgcattttcatacacactcatcatgggggaggagggcactcaactcaattcagtttatgggatttcatcccagatttctaaatacattatacttatgactctgttcattatcccacccctcccttctctgattatggatgtagtgatgctgattatttttatattcttcactatgaaataactatcattcttcatccatttgggcttctataaaaaaaaataaataataaactgggtggcgtaaactaaaaaaataataaactgggtggcgtagaaacaacagagattcattgctcaaagttctggaggctgggaagtccaagatcaagatgaaggcacactctgtgcctgatgacagaccgtttcctagctactagatggtaccttgttgctgtgtccttatatgatgaagaggcgagctggctctctagggtctcttttataagggtactaatcccaaacaagaaggctctgtactcataacctaatcacaacctaaagacctcaccccctaataccaacctcttggggattagctttcaacatttaaattttggaggaacacaaatattcatactatagcaacattgcaagcaaaattagaataatgtattagtactgttgtgtgggatataacatgagcatgttaagaagagaatcactggattttggaatgtggtaaggccaattatctaattctcaggggaaaatactcagtaagactgaggaagtaggccaggcaaggtgactcatgcctgtaaccccagcactttgggaggctgaggcaggtggatcatttgaggtcaggagttcgagaccagcttggccaacatggtgaaaccctgtctctactaagaaatacaaacaaacaaaaaaaaaattttgctgggcatggtggcacactttagggtggctgaggctggagaatcactcgaacctgggaggtgggggttgcagtgagcggaaatggtgtcactgcacttcaccctgggtgacagagcaagactctgtctcgaaaaaaaaaaaaaatacactgagtaattaaatgtgtaaacatcattttaaaaaaacttttaaaactagtttttaaacttttaatactttaaaattttaaatcatctaatcgaacatgtatataaagatcaaaacaaattaattgtttcagtagaacagtggtgcctagagaactttatttctctggacccaattattcttaactcatcaaatcatatatatatctgtttattcatacgccactccatatatacctaagatagatacatagattgaatcatatgaatttgctgatattggtccattttgaccaaaaaatgataagtttttaggattcaaactaatagctctattactgtattgattaagtggagtgataaggtaccagtgcaatatgttatcactccacttaatcagcacagtaagcccaagaaacataaaacataaagaatattttagaaaatgatgatgatgatttcattttatcaaagctatatgctcctttactgaaatcagacaagggaaaatgttcccttctgtagaaactttattaatcccttatgatcttaatactgttaataatggactagactgtaaaggattaggtaactgaggtgttcaatatggatacttgttttatgtttaatcaaatttatctgactctaaataaatttggctgaaactagacagattccttttctattgagacagtgggctctattaagcactatgtctgcataggaaacattacaattaattttgcagtgacaatatgctttttaactaacagactaatggaaggaggactgatgtaaagcataattctcaaaaagaggggggtaaaaccttggtttctactacaattattcattttatagtattgtttgataacacatactttattaaattgtagatgcattgtaagtttttatagtatatgggaatctaaataaaaggagttatttggttgttatgccatatttagcataaatattaccatccatgtatgttgttgacttaaaacactgttattttctaaaatgtaagcatagaaaaagaataaaattcttagttgatattgcagaaatatattgtagtgtttgcagcatgaaaaggttttatatataataatatacacttaataattaatttccaaaggctgcctgtggtcagccttctttgaaagcatggattctggcaaatgagcaatataatctctttaagaccatttaagctcttaatctcttcaaaccagtaccaaagtctgttcattttgttgtaatagttattgtgtattgtttctttttaattgtgtaagtgagattcaacatcacttgtcagataagaaaaaaaaccttcaaaataaacgttaatttttcccattattgctagaaggaacttggcgtttgaaattttagatattcttaaaatttctttttaaaaatttagaattaaaaacacaaaaagaaaaaagaaaaaaatagcatttactattattccccaaaaatgaaatagtaagatattaacaatatatatatgagatatatatcctgaaaattacaaaatgctgataaaagaaatcaagacctaaataatttcagggatatattgcattcatggattggaagactcagcatagtaaagatgtcaattcttcccaaatcgatctatagatttcatgactgaaaacgattaatgtgggaggaattgctctactcaacatgaagaccttagtatatagctacagtaatgaagacaatgtgatattggtggtgagacagaaacatggagcaatgtaataaaatacagaacccagaaatagaaggaaattattatgccaaactgattctttgcaaaggtgtaaaagcaattcaatgaaggaaactatcattttcaacaaatgatgctagggtatttggatacacataggcagagaaataaacttgacctgaacacctcatactttattcaaacattaactcaaaatagatcatggatactaatataaaacctaacgcttatagatttttcatatatgtatgtgtgtgtgtatgtatacctggattatttccatctatgggtatatatgatttattcctgcctttcctttaaacccaatataattgagaattagtgcaggggtttttcatctttcctagttcaattttacattaataatctttatccctttaaagatattgatattgaattgttggagtttggttttcagaacagatgttttacagtctctggtagctaattgagttttcccattcccttgattacttcttgtactcttagatgaaagttgagtatgtttttcagtgtttattgctaggaaatagttgattacagagtcatttactagataacaaacatggaaagtaatatgacaggtttttgcttttaattgtgcttttaatttttattctacatataggaaagggtagttttcaagaggtatattgcaaaacatttgataaaaatctcttaagaaaactgaatcttgactcaataaaggaacatatgtttccaagcttttttgacaatattaaaaaaaaaactagtcctctggtcaaataaattgaagaagtttctacacaagagtcatgtattttatgtactgttgtaggcatagtaatgatcccccaaagacatacatgttctaatcttaggaagctatgaatatgttgccttatatggcgaaatttaggagtcctcaagtctactctcaggttcaattattccttaggaggactcatataattcttaaaagcagttacactcatgattacagtttattacaacaaaaagataaagactgaagtgaacaaagaaaaaagttgcatacaaccgggttcaggaaagaccaggtgccaccttccagttttcctctcctcatgaagtcatctggacagcatttaattatcccaacagtgatgtgtgacaacacacacatcgtattgccaacgaaaagttgcctaagtcttggtgtctagaattgtattggagtttgtagtaggcatggaacactcacatggctgactttagtcatctccagcctctccagagttcaaactgatacagtgtaacctaaaagctgcaccatacattattaaaataaactatctggtattgcccagaagccagtcaagagccagatatttctttggaatgtacagagtttgaacaacccagtcccgttaagttaatattttaccataaaaaggcaaagtttactttgcagatttgattaaattagggactttgagatggtaagattatcctggattatgtggatggaaccaattaaaaataagcacaaacacacaaagatccttcaaggtggctaggtgcggtggctcatgcctgtaatcccagcactttgggaggctgaggcgggtggatcacctgaggtcaggagttcaagaccagcttggccaacatggtgaaaccccttctctactacaaaatacaaaattagccaggcatggtggtgcatgcctgtaatcccagctacttgggaggctgaggcaggagaattgcttgaacccaggaggcggaagttgtagtgagccaagatcacgccattgcactccagcctgggcaacaagagtgaaactccgtatcaaaaaaaaggaagaaaaaaatccttcaaggagtcaaaggagatgttggaatgaaaagcagtgtgtcagagtaatgtgatgtagactggaagatgctatactgcttgctttgaaaatggaggaaaggggccatgaatcaaggaatgtaggcagcctctagaagctaggaaatggattctcccctagagtctccagaatgaacagcgccccattgacaccttggttttagtccagaactctaagaaagataaaaaaaaaaaaaaaaacaaaaaaaaaacaggctgggcacagtggatcacgcatgtaatcccaacactttgcgaggccaaggtggacggatcacatgaggtcaggagtttgagacctgcctggccaaaatggtaaaagcccatctctactaaaaatacaaaaatttgcttggggtggtgatgcacgcctgtagtcccagcgacttgggaagctgaggcatcagaattgcttgggcctgggagatagaggttgcagtgagccgagatcgtgccaccacactccagcctgggcgacagagtgactgagactctgtctcaaaaaaataaaagataaaaaatatatgtacatttaaatcactaagttcatggtaatttattatatgagcaataggaaactagtagagtttaatataattattatgtctatgtttgtgtagatatatacataaatgggggttgtgtgtgtgtgtgtgtgcgtgtgtaatgtcaaagcaaactttccaaatgcttacttcttgtacatcttaacctcaaggcacacaaacacacactcagttgcataaatgcacattctcacattacacacacacacacacacatatatatgacatactacattctgttctagcttcctttaatgacagctcacaaatatgtgagtagaatacactgggtttgacttgggattatgaaattcatggtaaacatcatcaaggcagatggatatctaggtgtttgattatattgatgaacaggttttggtatacaaagtgacacttgttattaaaattttgatttcatacctatttcaaactaaattgcacctacagtccctttgcaagctccactttttagaaattcagctttgtattcactgcatttatgacattcctttgcattttttttttttttacatccacttcgcttaacaagaagacactgaagttctaagtagcactgtataggactgaattattaatacagttcttcagttggtaacaagaatgctcttggaaatatcttgtacatttgtcttctcctggttacttagtagattgagcatgtaaaaaaatcttttgcttaaaattgcagtacatcttaactgacaatacttcttaaccatagtgcctgacaaaacctggatattataatctcgacgtacaatttggtccagcagttgatctctgctcagatcattcaaaagggcaattagagaaagtcaacaatacacatgtctgtaatttagttttctgtacaaacaccataaccaaatgggatgaaaggatttaaccatttgcaactaaaaacagtatagtgctttataaaaagggcctaatcaagcagtatattgattgaaactttgtacagatggttctcattattcacacattctgtgtttgggagttctcaaaacttgctaaatttaatttgtatccctaaaatcaatgctcatagcattttcacagccatttgtgtgtatgcatagagtggtgaaaaatttaagtcacccaccacacatgttcccagctgagatcaaaaaaggaacactctgcattcttgcttcaggtctcatacggtaaacaagtgtcctttcagcggtgtatttaatgctatgtttttcatatttttatgctttttcttggtgattttgctgctttaaatggccccaagcatgatggtgaatttctgtctagtgttcctaagcttaagaaggctgtgaagtaccttagaaagaaaataggttccttaggtaagtttccttcaggcttgagttacagtgctgttggctgtgtattgaatgttaatggatcaataatatatattcaataagatgtttttaaacagaaaaacaggcaaaatgggattatacattgctggttcacaaaaatgttatgagcagaggctcccagaaatctatcattgtatttctcctgggaggaatgcttcagtattcactaattcagtgttcacagtgactttatagaaacacagtgaataacaagacttgactgcacattgtcatccttcatccaacccacttgcatagtgtagggtctacactttccaacagtactaaaaacccagaacgacattcaagttatgcaggtgtattatttagctgtatttgggttctaagacatgagtaaagttatatatttgtacagctcccaactatatacagttgtccctcagcatgcacgtggtattggttccagtactctcatgtataccaaaatctgaacatactcacatttcacagccaactctgcagaacccgcacacaggcaaaattggccctctatatacgtaggtttcacattctgcgaatactgtatttttgatctgagtctggttgaaaaaaatggcatgtaagtggacccatgcagttcaaacccgtgttttctcaggactcaactatgttatttatccttttacttttttattccttttttattcctgtgtataaaaaattgtaccaccagtacaaggaatgtcatgaaattgaaatgacaccattctgtgtttcttaaataaatgtcatacaggttctatgaagaataaattctcttgctaaaaaaaaaaacttgctatttttcatcatttgattttctcatattaacatttttcatcttaaatagtctttctctttactatttcccttcacatttcttgaaaattctttttcttgcccatctgttttgtatctccttattattttctttctgtttttattatgctagccatggtaatgataaaatctccgacttccaactccctgcaccatttggcacttggcaaatggcttttttatgtatttatatttttgttatttatatgtctatatcctaaacagaaccctacgcataagagcaggtggccagtaactaatggcattgataaaatagagccctttacctctattttcttgaaatatgctttcaagaaattccttgtactagatcatcgtgtatcataacattatgaacacagcagcaaaaaacaagaaaaaaattcagactttagtattcgtaagtaatgtcaatacaatatttggtttaacagacatacgatcattttgtttgctatttcaccatattattttttatgtaaataaggtagattatttccaaagtctttctgaatttactaaaatctcattttacatgaccctactttagtaccttaactaccaccctcctaggaatatatctgtggtaagaacagacaggtgtatatatattatagataagtgtctgtctgtgtgtatgcatacatatgtgtgtatctatatattaaagtatgtatatgcaatatgaaggtatgtatatatgcatatatatgcatgaattatattaagcatatgtatatatatattatagttaagtgtgtgtatgtgtgtatgcatacatatgtgtatctatatattaaagtaggtatatacagtatgaagtatgtatgtatatatgcatatatatgcatgaattatattaagtatatgtatatgtgttagatatttatgtatatatgtatatttataaaattatgaagttctacattgaactgggatataaagtccatgatatctttacataacttagaacagcaaaactctcgattcattcttgttttcaaaatccctttagcttcattttctctggtgcatgaaacaacataaaaatccctcttcttgccattaatctcttcaaatcccatgccagatattgtcaacattacagctataaaaattttagaatgttttagggacatcttgagatctttaaattaaaatatccactaaattaacatcataagcctagactcgtaatctttatttttgatctgactttctgtggcttgcaaatttagaatcaggaaatgaaacaatactcaatttttgcagaattagggcttacttatgatgcaaggctaatatggataatttcttaattgactgtatctgctaagacaaaatcaggaaatgacttaattaaaatgaataatttaggtgatattctctatattgtaatccaaattttaaagaagcgaacttctcttagaagaaaaatatacatttaataattggttcaatgttattatagaccttttgtgttctttcagaacataataatggttgctaattttctgggcagaatctcttgataagagagttaaattgactcagattatctgcaacccactggactattgtggtaatggcagatattttttaaatttaattcattgatataaaatatttagtcttttataataagcaattaaacctttgtacttaagccacttcaacaaaaatattacaaaaccattaggcagctacaataggctccatgcatttttaagtacggtttatacagaataaattatttctgtattggaatatcttcttaataatattgatgtttcaagaaaacatccaagctattttataagttatttgaatggagactgaattatatagtagttttttgttgttgttattttaattcatacaccttttcagtagaaaaaggtgccttggttttaactttgttaccccacaagcacagatattaatttttattgcattcttcactaaagtacatcttgcatttgattttcagacatggataagaccatgatagctaatgaatgactaaaataaatcaatactccaaatacttctatgcttcatttttgatggaagtatgagtaagggatacaagctgaaggcctcctatatatagtacttctacattactttttttgttataattttgtaataataatataatcacaccacatacttgtaataaaaatataatattcatctaggctaattggtcaggtcctgaagtaaatatatctcttcacaaaaggccaatgagtgacccacctactggtagattttatgcaaatggttgcatcttgtacacctttattattttttaagtatatttgtttcctacttgtaacctattctaaaataaaaagtttactatctctttgcagtaaaaataaatatcacatatctatatatataaagatagatatggtatacacctcagtatagatataaagctctttatttatttatttgttcatttatttatttatatttatgtttaaatacagacagatttccagattttaaaatgcatttcttctcactgaatattaagggacttaaaccatatactcaatttgtcaaagctgactggggaatataaagaaagggctagatatgtaatatgtgttgctaatattaactagaatcattattttgaagtacagatcttagttcaataacatagcgcgctagagcagaccaaagttattaacttcaattgataaagaattatgaatataattataatcctgttaattatttaacaccgtgaattatgcaaatgcagcaggtattattaatcatctgcaggaaccagaacaatttccctaaaagaacatataaatattaaaaagtctgacttggctctgttatgtactgttagagctttagtgttcccatatgaacactgtttggattcaattatcctttataacatgaaaaatgccccgaatgcatcctctccaaaggccaaatgaatgtcattagagttctccttttgtctataaaatgtttactgactgtgtggtctcgcatgtttgtttatatcaaaatatctttcatcctattaggctaatactggtctgtggcggctggcatcctacttgctaatagcacgttgtgtggatatccttgctgtgagactaagctacatgtgatagtcttgcagtatctaaaaaaattcccaaaattaacatatgttgaaccttccctcaatactaaggaacaacagagcattcaatggagtaattttaactaatttcctaagtatgctcaccctttacagaaaggaaaaaaagaaaaagaaaaggaattccaaattggacctttggaaaacactcaattggggagaggaattggtaaggggcttgaagatctagtttggttaacagattgttgtaaattttcctgaaggaaatattagccctttcctttaaagagttatttgtggaaacctttaaaaaggattttcaaaataaagactgtttgcctcaatatattggagtttaattcctatccatttttactttatttaaagttagacgattaattgattctcagaaaaattatttgttttaaaaggaagaattatttatttcgaaatctcaaaatatttccaaataccactgtgattcttggaatgcaatctttcttgggaaaatgccaaagttgggcaaagactggggtaggagttaggagagcaggcaaggacatgtaggaaggaaggcaaactagggaactattgtgtttttgaatcttttaaactcttagcctttagaacaatgtctggcatagagacttccaaaaagaatggttcaattcaatgtcataagtagcttgtcatttatggcacattcacaataaatgacagtataaatcaactgcgcattggtagacataccagagtcatgactatttcaacattcattttatccatgtgtttccaagtatgataatagctgaacattacgtggtactcaatgaaatttagatttatgtttatgcctcacatcttagcaattatatttgaaaaactggtgtctgtacagaatgttacagtttaaaaaggattttggatgagtaacttttgaaggaggtaggatttggggactctaaaatatttttcttcttatttttattgaatttctgcctgtgactgctttctaccctaacaatagaggcgctgcttactgtgctgcctgctgtatctcactggaaccattagtacttacaatgggcctttctgatctttatttctatatatttatattttttctgagatggagtctcgctctgtcacccaggccggagtgcagtggcgcatggctcactgtaacttctgcctcccgggttcaagtgattctcctgcctcagcctcccaagtagctgggactacaggcgtatgccacgacacccagctaattttttgtatttttagtagagacggggtttcactgtgttagccaggatggtctcgaactcctgacctcaggtgatccgcccgccttggcctcccaaagttctgggattacaggcgtgagccaccgtgcccagcctctgatcttttactctttctaaggatgactcgtgagtgaaatgtcaaactcttttatttatttatttatttttacaaaattaaaaaagatataatctgggaaaaatataacatctgaatttttattatatgtaagtctattaggtggaaggtagaaatagggccagccagtagaaattgaattctttgcatgaaggagagcaaatttaggtgtaatataagaaagaactttctaatagctaaatctgtctcgagttgcaatgatcatgcattcttctctcctcttttatttttggccactgctggatttcagggatcatcatctggactctctctgctccaatacatacttggaatctatttaatcaatgttgttattaaaaggatataattttacatactttaaaagaattttgtccaatactcctcaaaacaatccaatgagctaaatattaatatcctcattttgcagataagtaaactgaggcatagagcatgtattagtcagggtggggataaacaacttgtccaaagtcaccaactatttgagagcacattgaaacttaggcagggtagcgccatagtatcttgttgtaatatctactctatgctgcatctgtcctcagtattacagagacagagtctgggtccccatggctttgtactaattgagactttggattgtttgccccaattttcttctccagactcactttccaacatgacatttatattgctgtgatgtagccacatagaatctctcacctctcacccaaacatgccaggagttttcaagcctctgtgccatttgcctttcccctccatgtcccccacacccatcacagccctacttctaccattctatcagtggaaatctcctacttatttcctcaattaaatgttgttccctctatacatttagcaaataccaggcccatttaggtactccttcctcattttagccaaagcttcagattttcagctctactatgaccatacgttatattaaatcatgtatatttctgttccttgttataaactggaaactgcaagatcaggaaccacatcttcttcatttgtgtacctttagacttcaataagtaaatgcattaaaaatttgtctaaatgaatgatgcacatgtaacataaagcaagagtttcttttcatagtaagtattcaagcaggagctaaattgaccagccagcatcactgtggtaaagaagacaactgcatagggagaaaggttaagctggatacttgtctctatggcctttttgtagctctctcattgcaatttcatgtcatgccttacagctaaaaagtgccagtcagaaatacctatccattgtgtgtggctcaggctagttgattatgatccccaaggcctagttcttagaaaatgtgtttgtattatagtccaaaaggagctactctctgtctcctttcctcactaaattctcttttatatttttcaagtttacagaagctatatttgggcacagacttcagtaatttttcctctgtgcataaacactcaaccaggaaatatttatccctcagagacactgacaaaagatgtgttcttaagttattgctaagaactaatccttttcaccatgggaggaaaacgtaatgctctataatgtgacttatgagactgaaggttttttataacatagaatgaaatgataagagaatactcttgaatatatgtttgtagttaattacagaagtgtgcaaacaaacttctgacattagtttgttttgtctcctaaattaggtatagatttcttttttttttttttgaagttatatttggcattttttttaaattttattattattatactctaagttttagggtacatgtgcacaatgtgcaggttagttacgtatgtatacatgtgccatgctggtgtgctgcacccattaactcgtcatttagcattaggtatatctcctaatgctatccctcccccctccccccaccccacaacagtccccggagtgtgatgttccccttcctgcgtccatgtgttctcattgttcagttcccacctatgagtgagaacatgcggtgtttggttttttgtccttgcaatggtttgctgagaatgatgatttccaatttcatccatgtccctacaaaggacatgaactcatcattttttatggctgcatagtattccatggtgtatatgtgccacattttcttaatccagtctatcattgttggacatttgggttggttccaagtctttgctattgtgaatagtgccgcaatgaacatacgtgtgcatgtgtctttatagcagcatgatttatagtcctttgggtatatacccagtaatgggatggctgtgtcaaatggtatttctagttctagatccctgaggaatcgccacactgacttccacaatggttgaactagtttacagtcccgccaacagtgtaaaagtgttcctatttctccacatcctctccagcacctgttgtttcctgactttttaatgatcgccattctaactggtgtgagatggtatctcattgtggttttgatttgcatttctctgatggccagtgatgatgagcattttttcatgtgtcttttggctgcataaatgtcttcttttgagaagtgtctgttcatgtccttcgcccactttttgatggggttgtttgtttttttcttgtaaatttgtttgagttcattgtagattctggatattagccctttgtcagatgagtaggttgcgaaaattttctcccattttgtaggttgcctgttcactctgatggtagtttcttttgctgtgcagaagctctttagtttgatgagatcccatttgtcaattttggcttttgttgccattgcttttggtgttttagacatgaagtccttgcctatgcctatgtcctgaatggtaatgcctaggttttcttctagggtttttatggttttaggtctaacgtttaagtctttaatccatcttgaattaatttttgtataaggtgtgaggaagggatccagtttcagctttctccatatggctagccagttttcccagcaccatttattaaatagggaatcctttccccattgcttgtttttctcaggtttgtcaaagatcagatagttgtagatatgcagcattatttctgagggctctgttctgttccattgatctgtatctctgttttggtaccagtaccatgctgttttggttactgtagccttgtagtatagtttagatttctaattgttggagagagaatctgtttacatattggtgaccgttacaagcaaatctaaaatataacatcattttacatcatatattaaattatattaaaattcattaataaatttgaaaggaattaattcatatttataataaataacttcagaagattcactgatttaatggaaaaatttgttgataaaattatattaagagaggaaacaaaagacattaaataaatttgaaatgataaatattcagacatttaaaaaattaagtgtattagttcattctcacactgctataaagaaatacccaataatgcataattcataaaggaaagaggtttaattgactcacagttcagcctggctggggaggcctcaggaaacttacaatcatggcagaaggggaagcaaacacatcctcatcacatggcggcagcaaggagaagaatgagagccaagcaaagggggaagtcccttataaaaccatcagatctcatgagaacttacttgctatcacaagaatagcatggggaaaccacccccatgattcagttatctcccactgggtctctcccaccacacagggggattatgggaactacaagatgaaatttgggtggggacacagacaaaccatatcagtaagtatctacataatccatttgtaattcttcccatcccatattcctattacccaggatttgtgtaatctaggagacataaaacttctgaatttgtattatatgtaagtctcttcggtggaaagaagaatgttggctttattttatcattttaatcttagaagattttaaaaccataattcttaactgaaactaagcttattttggcttgttatatataccacataacttaaaattttaaaatgtaaaataccaaaggagttgaaaattatgtccacacaaaaccctgcacatggatgtttatgacagctttattcatcattgccaaaatttggaagcaaccaagatgtccttcagtaggtgaatggataaataagatgtagaacattcagacaataagatgttattcattgctaaaaagaaatgagctactgagccatgaaaaacacatagaggaaaccagtgaacaagcaaatctgaaaaaatctacatactatatgatttcaacaatacgacattctgggaaagcaaaaactatgtagacagttaaaagatcagtgttttccaggggctgtgagggaaatgtatgaatacgtagagtccagaggaattttaggacagggaaattctctgtaatgatgctataattgtgaatacatttcattatatatttgtccaaatccatagaatgcacaacacccaagaatgaacctttactcttaactatggaattttggtgataatgatttgtcaatataggttcatcaattgtaacaaatgtacccgtctggtgggagatgtagatagcgtgggtggctgtacgtgtgtggaggcaggggatatatgagaaatctctgtaccttcctctcaattttgctgtgacgctaatactactctagaaaaattaagttctttaaaaaatgtgcaacactactaataccactatagaaaaatggaaagagtaaagagaacaaatagcttaccgcaaaagaaatataaatgcccaagaaatatgaagatatgctcacggaattagtagaataactaaatcagtagtttttaattttaaatttatttttatgtaaattttacctatcaacctagaaatggtgaatacagtagaagagtcagtgaagtgggcatgccctttcttgttggtgaggttataaatcagtctaatggtttttgaaagcattttggcaatatgcataaagagtgtatttgaccctatgacccagcaatttgtcttctgagactcttccctaaagacatgattaaatagtatggacaaggttattctttgctatgttacttttaagaaaagtggaaatgaccagcaacctaagtagctgaaaaataagggtcagataaacaaatcttggcatatctgttgcaacggaacattaagcacttattaaaattatgttttcaagaatatttagtaagatgaataaaaattgatcacattataaaaatatatagccaatatgtttaatactatgaaatatgtgtgtagaaaaatgaatattaaaataaaatttttcaaaatattaaaacttaatatcttacatgatgaaatgtgtcatgtatgtattttatcttacaaactgctatgatctgaatgtgtcctacataattcatatgttgaaacttaattgccaatatgatagtactaaaaggtggaggacattaggaggtgattaaatcatgagggcagagccctaatgaatgggattaatgaccttataaaaaggctggtgagaaccgagaactaactaggctcttatatttttccatcacttccactatgggaggacacagcatcccttctctctggaggatgcaacgttcaaggcatcatcttcgaagcagagactgggtcctcaccagacacctcaccagcctacagaactgcgaacaattaatttctgttgtttataaattacctgtctcagatattttgttataatggcgccagtggactaagacacaaatattttcttacaacaaagggaaaaaacttactgcataattttgtaaaatcgaattggaatgagatacactgtgttcacaattttaaaaagtttcacaagggcataagatcattatgcttggcatgtcttccttaaaaaaaaatataccatgaagtataatttctaagcattatgtagagagccacctatttctgtctgtttggagtgggcagggtatccacacactattttgaagaggtgcttgcaaaattgagatggaaaaatgtgtacgtacagttcctaaggccttacctggagagtgaattgccctggtttttacaggtaataccacttggaaggaaactcatgcttctccctaaatcagacaatgcctggccttgagtggtgtcagggtcctggtgataatggttattttaacctcctgcttttctacttctagcatattctgcctttggcttcatgcaaaatactgaaggacagcgagtgcatggatactgctttatcgaaccttgttaattggtctctttgctataagaaatacattgtccctgaagccacaatactaacgcgactggttctacatcttaaaaaatctttgatattttacactgtgtctgttacatggctattatgtttaaactcccttgattagattatagaagtttacattggggaagagtatgtaaaagagacagcaattactgccaaaatcttccccaaatcagtgtcttagtccttttagactggtgtaacaaaaataccataaacagggtggcttataaagaacagaaatttatttctcccagttatggaggcggggaagttcaaggtcaaggtgcaggcacgctcactgagcttccaaggcctcttgggcctctcttataagggcattaatcccattcatgaaggtagagccctcatgacccaataaattcccaaaggcactaccttataatatagtcatcttggtgattagaattcaacatatgaagtttgagaagacacaaacaatcacagtatggcatccaaacattacaaagagttatagtttgtctccacagttagcttagtattaaattttcctcatcagcaagataggaaaaggttagttgaggatgaaccagaagttttcacctgatcatattgacatgggtgcctgataatctcatgcctttatgggaattatatgttcttcattaaaaacaaagaattctggcctttgccaatgatggctttaaactagtacaagcattctgggtgtggctgtggtatttgatcaaagctaatatttgctaatttgcatgttcaatgcaacaatcataaaatactggatagtttcaggtctagtttatgcaccacaaaaaagcaatgataaaactcattcatcttcactttaaagtcgttgtgaagtggctgtttccactgggaatatataggtagcatgtaaaacagttgtcttttctggtaaaggggtttcttgctaaggcgtgaccacaaccaagtgattctttctcttttgattagtattcattgtctcttctgagctgtctctagtggatacagtttagaaatttaacataaagaaagaaagagctctcacactgtaggatttgcagcatgctatttaagtgcaactgctaccacagttaaaggatcatcggaaacatcaaggtgaatgggaaagtggagagagtcaaaattcaagaagagacttttatattattaaaatttattcaaactgtaattgtaaaaatggcatggaggaaaagttaaagtcgaaaatatcagcagtatgtaaaaaaggacaatgtaaaacatctaccaattgtcagaatggctagaaaaacatattccattattcagccaaatattcttgcctttacctctccctgttctttacctgtccacccctagactgtatctttcttgcatatttcattttaagattcttgcacataatttagagaactgaagcaactacctagcccatctttcctcactaggccttccttagaatctgcacggagtcaagtttatggcccctttgaaaagctgcagctccttaccaaagttttttcaaatagaagctaagaagggaaggagtaaaagacagcatttgtataaacattagctcatgtaatcactataaccacctatttaaggtagatgatattaatttcattttcctgaggaaacttactgccattcagatcaaaagtcttctgcaaagtcctacaagtaccaaaagaaaaagtcagggtttttacctatatctctctaactctgattatgtcatttttcttttctctcattttggttttcaactatagagtaacataataaccacttactctcaggaaaaaaaaattagaataaaaatttgcagaccttgcttataaagatttaattacatttaaaataaatagagaaaatatttggaaagtttatttttaataatgatgagtttcatttaagttatgtattctctgtacctattatgaaatatattctgtgaagttgtggttatctgatacaggtggaggtggtagacattaagactcttgatagctgttccgcttctgtcccctttctggtacgtggaatcacttccgcactcacttgaagttgagtctggctgtgtgacatgccggatcaatgaaatgtgcgaagaagtgaactgtgtcacttttggacagatgttctaagagccattgaatgttttactgtgttctgttttctctcagacctatcaaccaacaacactcaaaagttggctgctttatcttcctgagaccaacaacactcaaaatgttggctgttttatcttcctgagtgattacagtatgtagccatcccctgcttattaggataggcacagagtatcagcaagaaataagatactaagagaatagaatttgttattactaaagattttcctaaagtgtccgatacgctcaacattgacgattgttttgcagccaaaacagcaaacatatttaagaaatgtgtttaagaatcacatattgaatctgtgattcacatttgttgtgatggtaaaatatttgtgtagttttctccttttttcagcttctattttaaataacataaattgtttgaaattttgttaatggttcttgaaattaaagacgttcagcaatgatatggtcttaatagaaggaaattgttttccatcactgaagattaattaaattttgagtaagaattgagatatgtgcggctaacacagggaattatctctgtgtttctggatgaaatgggattattaaaacatgaaggaactattttcctcttacggtaagagaacagtaacttaatagtgaaaatcagttgatcatcacatgcttgtggctaaatatcagtttgtcctttttgtagctgctgtaatgatatgttattgaaatcatttagggatacttttttgttgttaatttttatggaggtattattgagaaataaaaacattctatatatttaagatatacaacacggtattttgatataattaacatatccatcaccgggcatagtagtctcttttttttgtgatgagaacacttatgatctactccctcagcaagtttcaagtataaaggacattaatattaactacagttaccatgctgtacgttagatctctataactgaaggttcctactctctgaccaacaactccccatttataccactcctggcaaccgctattctactccctacttctataagttcaacattttatattccacacataatatcatgcaacatttgtctttcatttttttctgcccttatttcacatagcatatgtcctccaagttcaccttgttgcaaatcgcaagatttccttctttttatggctgaataatatttcattgtatacataccataatttctttattcatccatacatccacaaacacaggttgtggctatatcttggctattgtgaataatgcagcaataaatgtcagagtacagatatatttttgagatactaatttcatgttcttcaggtaaataatcaacagtgaaattgctagatctcatggtaattctatttttaatagtttgagaaacctccctactattttttttgtaatggctgtaccaatttacattcccacaaacagtgcatgagggtttccttttctccaaatcctcaccaacacgtatttttaaagatacaatgagacaaactttttatttaaaattatagaacaagaatgaatattaccaattcatcaaaaaaaaagtctgtctactatcaaagtctatttttaaactttatgttcttttacttaaatatttttggaaaaaaagataattatgtacactaatgtgtgtgtgtacattcacaatttggcatatactattaatttggtttaaatttaatttggacataataattcttaaaacttgtcagactgcttgataagtaggtattagtgtatcccacctcatctacagagatgaaaactacagcgtaagttatctaaaacagtaagtgtattggatctcaggaagtatcacttcagaggtgttattcttaacaataacactattcagcaaatgctgcaagaataaaatcattaaaataattttctaaacatcaaataagccaaagtgaatgtaagcttttgtgaataagtttagattcagttaaatttctcaaggatcagctaaattttttaatcaaaaatttcaaccaggtactaaaactattttttgtgtcttcctttgacatatgggctatgtatatgttatataaaaccaaataatgggatatttctgattattatacatttgaaacatatcattgtgtctagcttcataacgtagctatcatattttggtaagttaaattgtatgtcaaatgggtgctcagtctggaagactcaaaaactagaatttttcttttttctaaaatttagtaataattgacaaataaaagcatctggtaccattatacttcctacagtctatattctcctatcatgataaaactggaattcatattatattgaaaaacctcttatttttttcttttttcttctttaactacatcctacagtgtaccctagaagacataaattcaaaaatgtgaatagttctgagaggttttcttgggattttaccttttatgaaactgctataatttatagaatctgcttgtgctctgtcacctaaatttaaaaagctgccttttattatttattttttagtttgctccattcagacagtgatgtttcatgtgggagacatcaccacaatggattactttaacttggaataaccttgctttaataattatatggaatacctttcacaagagaaagcattactaggagaaaagccaataaagctatgaaagacatggataaaagtcaacagctgattggatatagaatctaaataatgtgatatgatttaacttacctggatctcataggtaaaatgaagaaatgatagttacatatcagaattcatatagaatatatgtgagataatgcaaataaatattttagtatcatatttgtcacaaaatagtttgtcatcacatattagctcatcccccatggatgtctcttgtcatacggttgatagaattctgtgtccatttgtgtaattttagctccctaaggatagccactatttgtcactcactgttttatctagatagcacagaaactgatagggagtagtcaataactcagtaaatgtttggccagtgaatggatttacaacatccctgtggaaataatggtagatgtgggtctgtttattgcacaccgcaattgtcaggatgtttattgcataaccagttgtcactggttagtctctgtgtttgtttctgaatttgtttagaacaaggctttatttttactaaaaatataacttgagttgctgacgaattttcagtttttactcatttaccttgctgatatagctagctgaatttacatatctatgtcactatttgtatttatctttatctccatatatttatattatatatacttatgtctgtatctctctatatatgtctctttggggatgtgtactgtgtaggtatattttaaccaccagctcagtgagaaagaactcaagctatgattcttagtgtttgcttatttctgtggtgtaaatacttcaaccacatccagtttcaagctatcaacatgatgttgctgagtgtggagctgggatgagataggtagtggccaattattatatagcattttcaccatacagataaaaggatacaaataacctcacaagtgtagacgacagtgaaatgtagtaaaataattaagaagtgatgagttttgaacatttattacagttgctttaatataatttatttaatcataagtttatttaattttaacaagggctatgtttaatagtatgccctcaaaattccttaagatttagcattcagctttcacaatccatagtaaatctttaatttcaaagtctctgttgcttttcattgtaaaactaaacgtaatccatgctttaactcttttctggttgttttcatatgtcctttaaattctcgatgttttgtatgtttctacagtgaatatttgtgagttgaaactttttaaataattcaagaatatacttttgtgtgtgactttgaaattgtatatactgcttgtatgatttctataatctattgccaagggtaataagagctagtcttaaaatcaaaaaggcactatattactctttgattcccttttttttttctcttaatgaagctgaaataactgggcactgaagataaaatatatgttaactagaagagtatttgctataaaataaaaaatttgacacattttggcaaaagttttttttttcggtagtaaacattttactacctagtatcaaatatattaaacttaataaatataagaaaacagagcctacaaatgcaaagtctaaatcctaatttttacctgcaattgttacttatatgagttcatttttctaaattaaaactaaatcaatctactctacctcctattcatggcctctgccactgcagtcctgaaggttggggtgaagatactcacattttacaagtttgtgaaatattaactaaaaaactatggcgaaatataaacatgaacattttggagagaaacacttctgaaatggtagtgtgtagtgtcaggggctccatggatgctgtcccgagtaaaacaactgtaactggtgaaaattgtaataaaataaccatggaaagtctctggaaatggtcttaagagcatatagcaaatggagaaatatttattcaaaacaaaaaaacctgcaaaatctcagtcagaacagtgaaagttaatgacatttgagcaacaatccccaccccaaccccactctctctagctctgtgtgacagaaactttactctggatagacatggccaaaaacagggtgcttcttctacgtgattctcttcttctttttacttatcagcagaagctgctgtggcttatcaccacgtctggtcatagctgaagagatgtggctgcttctgtatctcctgagctaccacacctagcgcagatccttcctctcataaatgagggagaggctaagaccatgaaaatgagaaagaatcatcttttaaacaaacggtgctgagaaaacttgagattcacatgcagaagaatgaagttgaccctttacctcttggtgaggaagaatataaaacgtttgggcagttatctaccttttggacacatacttaatattagctacactatgaattattggtttggggtgagttagtgagaaacgggttccttttatatgtttagcctagaggcaggtatcgagagagggcttaaatgaacatcctacaataaagtttaaatttttcatcctccattgcagctaggtatgatcatgtgacctggttctgataggacataataagaattaatgtgtgaaacttctaggaagagaagtccatcttcccctatcttccttgttatttctcactgttacttggatggcaatgtgatgattggagcttgaatagccatctggactacaaaatggaagttgtatgttgaagaagacaaactaataatataaattgtccaatgtccctgatgatcatggagccactgtactgcctctcaactgtctcttcttatttcagaaagatgcaaacttccattgttcctgatattggttattttggattttctgtcacttgtagctcagttctaatctcaatgaatgcaagagtcactgacaacctgctatagccaaggtactatattaggcactgacaggtctagggtgaaaaagagacatcgcctggttttcacagagcatacttactagtgagaaaagataaaaatcaaatatttaaagaatatgattttgagggataatcacataacctatagtgagtgaatctggatttaagggcttctcaattcaaagaaaagggaaggccactatgaagcagtgatagctgagctgatacatgagataatagacagacctatacatgtgatgatctggataacagaattctatatagggaaacaggaagcacaaagggaggaatggactaaaaaaagagaagcagaaaaattgacttgtgtggttggagtagagagggcaatggtaagagcaacaatgggagatgaggttagaaaatagagtaggagtcaaatgaaacagggtttaataggtgagggataaaagcaaaaccaaaaatatatacttcagaatcttgtcctggcatctgtttttcctccaatcatctcctcctttgtatattttctttcttttttttcttcatctatatatcttctcatttcattcattcaatcacctatacaatgtggtccactgtctccagaatccaaaatccaggattgtatcctactatttttttgtagattttctacattcaattgtacataaaaaactggcctaggaaatccgcaccccatcgtaatttgtattacaaatttaaaaccagtagctctcaaatcaaatttggataagaatcaatgtactactttgaagatcttccgaatatgtatatctgtttataaataacatatattttaaagtgttaacttatgatctttcattgatacatttctgttttataaaacatgatattcatgatagatctattttattcatttcaacatagatattatcttcgctactcttttaaaatagttttgaggttccaacacccagaaagtgttgaggaaaatttgtatcttctaatggtactaaatataatgtaactgactttgagctgtataaaaaaatgattccaaaatgagtcctaactcttggttttaaaggtgatgtaggtgtgaagggagatgtgacaaaaccccaaagattgttacggaagttttggggaagggaatgaaaacaaacccaccgtggtaattactcctaagattgatgaaaatagaaagtcttgtgcagtattagtagtggaatacatacattcttataaatttgcttgagataatgtggacaatgtgtattaaatgttaaaattggcatatataatttgcatgaatatacaaatgggttacatcttattccctaatacaagtgtggtcaaataaattatataagatttataaaatagcaaattatgcagccatcaaattattgaattgtttcagtatataaaagtagaaacatggccagaaactattgaaaaatattacaagtgagttacaaaacaatatatgtagtaggatttttagggtaacatatatcgaagcagaatgtgggaaagatgaagacggagacacagaaaaaactgtcgtttggaaatagtcttcaaataaattgggtgtctatctcttggcaataaaattataagtatttctctttttatttatatgtagctttttccagtgaaataataattattataataaaaagactttttaattcaagacaaaataacgagaacatcagtgtgattagaaggcattacatggggataaatggcagccatgtcatctgcaaacagagacaatttgacttcctatttgaataccctttatttctttctcttgcctgattgccctggccagaacttccaatactatgttgaataggagtggtgagcgagggcatccttgtcttgtgcgggttttcaaagtgaatgcttccagcttttgcccattcactatgatattgtctgtgggtttgtcataaatagctcttattgttttaagatatactccaacaatacctagtttattaagagtttttagcatgaaggggtgttgaattttatcgaaggccttttctgcatctattgagataatcgtagtttttgtcattggtgctgtttatgtgctggattatgtttattgatttgcatgtgttgaaccagccttgcttcccagggatgaagtcgacttaatcgtggtgggtaagctttttgatgtgctgctggattcagtttgccagtattttattgaggatttttgcattgatgttcatcagggatattggcctgaaattttctttttttgttgtgtctcataattggtgggaaatacatatatgttgagaatatatccgttgtttgaaaaacatgacttttatattcaaaagttgtaatctttttatgaagatgcattttcttttttaaggatgaaggaggggtagatgtatttttaagctaggaggaaagaaattcgactttctggcagcttattttgtgaccatgtataaatcaagcaaacaaaagctttcacttatagtaaagttcacttgaagataaaaattgaccaggaattaaagacattgtatgcacttgtctagtttatattacttgagggtggtggtaagatgttttctggcttgtatagcatgcatgtattaaagacctgagacataaagaagcaagtatatttgaggaactaaagtcaagcacagctagaatgaggaaagatgaatgaatcaacatgggttgggggagatatgtaaacagggattacctcatgcagcatcctatagttcgtgtttagcattctggattttataaccaaaaaaataaggagccgcttatgagatttagtcaaacggaataacatcatcatctttatctttttaaagctcattgtgagttcatgtggcagagagactttattgggaatagaggtacttatatagggattggaggatcaacaggctgaggaaagatgaaagaccagtaggaggtcgtagtacttataaagtcataagtgtaatatgattttgattagaatagtaacaatagacactgtttaaaaacactttttagtggtagaatctacgtgtcttgaagcttgattaaatgaaggtgaggaagacagaaatcttaaatgatacaaagttctgacaagagaagtttaataaatagtagttccatttaccaaggtgagaaatatataaggaggagcacatttggggtggaattcgttttgttttcttttgttttttattcatgtcatgttatgtttgaagtggacttgttcagtaagcagcagaaaatatgtgcctggaatatatgcgctcatttaaaagttatttccttttaaataattgctcattctgcagaaaatggctgactttgaatatcagctgttttctttttctttttcaggaaatcattcttgaaatggtaaacatccaagttttatcaaataccaggatataattgcctggtgtgaattattattttgttagtaactataatagataatccacagaaaatcttttggaaataaaagacttgaaattaaaagctatctggaatgttatatttaaggacacagaccttgaatgactgttcttcaagtaaagagtctttgttgacagatatcaaaatgtcttatattatgaattcacctcaacttagaattatgttaaaatgtgtggccttccttgaaacaccacctaaaagaattttcttattgtcaaacaaacacttaaaaaatagtttttgaaaaatgagtaaattggtattgataatcttatagaacatgtgtacagtttttaaaatatattgaatgtaaatagtgtctttctgtgtgaaactaaacaaatattggacacctccaaaaatattttgttctgaaattttccttggattgaaaaaatgactcaaatcccatattctacttacatctttattgtagcatgacttagggctcttctgtgaatgagcgtttacaccttattttaaaaaattatgttttaaaacaatttcctttgaaaataatggttttcaaaggaaaaaaagagcatctagggctcagaaaattttctttatacttgcaattcaaagttattttcctgcagcaatttcttaaatgaagatttttttaattaaaaaaactatattttgttgttgcaagatagaaataataactttgttgttcaaaattgacagagacgagcctaatgacttccttgtctgaccttgtctataaacttggaaacctcacagtctcgtcttcctgttgtcttcggatgtaattttgttggtagctcaggtcatatttgcttgtgtctatagtaactgagcccttttcgactttaggcactgtgcaagttagttggcatatgccacaagaataaaaaataaaaccaacagctattgtctcttggttacaatccttaatgttctaatgacctttctggaaaggtgatatttacgctgagatcctctgaactataaaaattggagggagagagaaggggaagacattcagtacagagaaataacatgtacaatggctcttaagcttcgaagaattagcgaacttagggaaatgatagaggccagcatctgtggagccatgaaatgaggcaggaaagtttgacgggacacctgtgaatctagagtgttttaacttcatcctaaggtcaataggaggccattgaacaatttgaggggatgtcacaatgggatgtacacttgggcattactctgatgctgtttgcagtgagaagaatatagagagggcaagatctcaggagatacagagttttatgttgggtacaggttggccgaagtaaattgtgtttatctatacaataaggttagatgaagtttgcaattgatttagttaaaaaatttcaaaaactggatgaccacataaataggaacagataacctattcggaaatatggcttccccggtccatcagatttcccagtggaatggcacccatgacactaaaggcccaatgtgagatctgcctagttatagaaagtaaaatctttatttttaccttaccctgttcaactgggatattacatcaccacttcgaaagaatttgaactaatcatctatgtgcttccattcaagagaatatttatataaatatctggttttttataatccttaaactaaacctagaataaaaaggccacatcatcatcagtggctcagccagctttccagaaggctggaaagccattcacctcgaggaggctctttcacttttgcggggtggctttgacaagggtagtggcacttatgaaggaaagaaagtagcctcacatgaagtattatttgcagggagcactgacaggctttgcagatgagttgaatggtaggaattgttttggagaaggtaagaatcataaaggattgcctgatgatggattgtggtgtgagtgagctaatattcctaactcagaagcatccattacttaaattaacaactaaggtgtgattgtgtcccagtttagagttcagcttctatttttgcactggcctagtgctctacattctactcctgtctttttaaccgttccttacttttcagatctatataattttatgctttactttttattgatgttgaagaaaaggcatttcttcttcttaagcagctagtatgggtatcataattcagctcaaaatcagttacaaggattttcattgttcaatagtgtaaaaatataataaatatccttgatgcctgtggtgaaatactatcaagcagctaaaaagagtgtattagataagtggttctcaaccaggcatgagtttggccatgaataagacatttgacaatgtctgcagttttttttatcgtaattactgcggaagtggtagcattgtactggcatctagtaggtagaagacagagattctggcaaacatcctacaatgcaaaggacggcctcccccgaacaaacaattatcagtccaaaacgttaaaagtgccacttttgaaaaaccctgtattaattagatccatatctcacaataattatgtaacccaaatatataatattgagtgaaaaaggaaagttgtagaacgattgcaaagcgtgatagtatattcattcttttaatgctagctagcatagcaaaccaaacccacaatttcagtgccttaacacaacagatatttattgtttgctcatgtcacagtccatggcattccatggcagcgtgttgctttcctgcatgtgacgatgcaaggatccagacgtcttccattttgttgctcccccgcatctcttcaacctcagagtcatctgcatacatccatagaatgggaaagaaacagcagagaagatatattagctttttaaaatctgaagctctgaattgacacaaattacttccactcatattctactgggagaaacaaatcaaataaccacacctgcatgcaagaagagctatataatacaattagaggctgaacagcctgtcagcgatactacctgggtatggagtggatcaacatggattcttatggatagctcattagctcaatgaaggatgccaagcactcaagtaaatttgtaaagaacatacacacatacatacacaacaacaacattatgtattgtttatggatataggaatgtatgtgaaaagcagaacaattgagctaaattaatgaacataaaattcatatatcatggcctcttataaagacgagagcaggagaacaggcctggagataaggaagtaaagtgttttcacatgtatttgaatcattttcttttataattagattatgcacaataaattaggacagattattcataattatgatttcctggagatatgtactcattgtataagtctctggacttctctaattttacctttctcaaaagaaaataaataagttgagtaagttggatgtatttgtatcagccaattaacttttatattgatatttaaatgagatataacatctacattattttttacatttatgtaaaattctagatatataaaacaagaatttttataaaagctattgttgttattaaggtatactttggtggaacattgtacagtgttctttatcgtatggtcctattcagattatgtaccaaatgcaatactaatatgctctcaagcttcttgaaaaaaatcctatctacatcacgataatatgttggtaatatttttgttccctgtttattttggtatctcaagtagtctcatcttttcttttagaatatacctgatttttaagtcatcttgtaaatatcaataatgtctttctttcttgcaagaaacagaaacccaaacaaaatacaattcaaaattcaaggtgtatttgtgcatactctggattatctactggtagaacccaagaaaaatttaacctacaggccatgggaatgatggggccataggccatctccatagtggtatgctactaagaatgactcattgcacaaattctcattttatgagtctcaggtaaagtattttaggaagtgcatctgtttgttccaagttgaatcaggcctcaatcttggtccagtcagccttgtcctagaggcaaatatcacacaatacaaacatgatatcaaggactctgcttatggattgtttgactggagggtgatagtcgccagagaagggagaaaaattatggactgagtagaacttcccaaatatctcttgtttagtgtgtttcttgttccacattattttgacagaaagaattctgagttatattatttgatcctccaagtttcaaaatccttacaaacaaaaatgtttttaatgccttcacatgtatgtttctttctatcatgttactttgaattatgaatgcatcaatatgtaatgttacagcattaaatgtatcaagtttgcttctccactacattataacacacacacacacacacacaaatgaattcgtattaaactttttgaaatctatgatttaaatagagagataagaagaataatgactggttcattatattacacaacctatgctttgtatatggttttcttttttaaaaatgtactttgtaagttgagaaaaaaggtaattgacaaaataccagtgtaaattttgaacacaataaaataaaattacatcagcccaattacaaagcaacatgtatgaatagcttaaccaactctcctgttttaggtccttacgtgaaccaaaatcctgttgttatttatcacttattggaaccaaaaagagccacagatgttgctttgaagagcaggatgctatgaagtactgttttaaagaccttattaaacacttcactgaaataggaagtcatttatgtagtcattaatacccctcactgcatttaaaccacagttctcaaaggaaaaagctgctcctctctcacagttttgttgttacttacttttaaaaatcaaagatcaatacctttaatgagaacatattgggaatatctatgtgctacgctctaaattaagcattagggcaaaaaaaaaaagatgatttttaaagtcttttcttttgaattttgaattgagatagaaaaccaacgttataggcccataaaagggcctgtaactggagacaagaagggggaaaggctgaaaaatatacctataccaaatttgaagagagcattgatagtcagtaaatatattgcagcaacattatgaaggtttgtgtaagccatgataaaaagcatagaataaaatatttaacataaaaagtagaagaggctcagcaaaaatttccttctattcacctgtcttaaaaagttaagtatttttatcttgtgtttaatgaagaagaatttggaaactaaaagttccaaaaattaataaatttttggctatgcactgttatgtccttttgttaaaaaacactaattgttgagaaaaacctgattgctctatcatctttttatattcaaaccaaatgtgcttgattaaatgttttagatgtcttattaatagacagtcttgatcttggctaaaacatctatagaaaggcttacgcagtgtgctaggtgcatgttgaactccctgtgttgttcaaactagagacataaatgattaatgaatactttatcatatgttatatgtgtattttatatatatatataaaattatagtcatgtactcatctgtaatttcaagttggtagacatttttgtttgcataattttgacagatttgttttgttttgtcttgttttttgagacagtctttctctgtcgcccaggctggagtgcagtggcgcgatcttggctcactgcaacctccgcctcccgggttcacgccattctcctgcctcagcctcctgagtagctgggactacaggcgcccgccaccatgcccagctaattttttgtatttttagtagagatgaggtttcaccatgttagccaggatggtctcaatctcctgaccttgtgatccacccgcctcggcctcccaaagtactgggattacaggtgtgagccaccgcacctggcctcgacagatgttttcataaaattaaataataaaatacaatctacatattaaagttttatatatttctgtaaattgagatatttttattgtcggcactatttttagttaggttgcttaaataaatactaaatatacaatgaaaacgaacatacctagtacagtcattctactcatcacttggtatagttgatgtttttttttttttttctttgagaccaaattttgctctttgtcacccaggctggagtacaatggtgcgatctcagctcactgcaacctccacctcctgggttcaagcaattctcctgcctcagcctcccgagtgcccaccaccacgctcggctaattttttgtatttttagtagagacggggtttcaccatgttggtcaggctggtctcaaactcctgacctcaggtgatccacccacgttggcctcccaaagtgctgggattacaggcgtgagccaccgcatttgaccaagttgatgttttatttgttattaatttcaaaggctgacatgtacttatgatttcagtagttaccagctactctacacgcagcatggtacaattaaatgtatatttagcttttggaacatttctttttaaaagttgtgcacattttaaaaaccaagttatctgaatcacgtgttaaaacatattaaaacaagactgagaattccatttcggacaagatggcataaactgatttttccctgctcctcatagtgaagaagaacaataaaacctagaaacaaaacaagaggccatcaaaagaaaattgtaaaggatagtcagagaaaagcaaactgctttgagagcctcgcgctagaggaaaataaactgcagcacattctcatatgtgcccctatccaacagaagatggggacccccacctgtcattttccaactttcaagcctagtagcagaaggcagcccagctagtttcctctctgaattgaataggagtctctcagacaataccagatgagcctggtataactggcaagggctattgaatgggagcccatctaacattaagcagctagggtaagtgcctctcctttcccagggatttaggactaccatgctctgctgaaaaatagacaagtggcagtattgtttagaggaattttgtcacagcaagtggcccaacctcggaagcctctttgtccctacaggcctaagacactctcactcactctcactcacaacaggaaatacttaggtggctgggtgcaactgccacaagggattttaccactctaagtggcctagtgcaggaagcctctttgttcctgtgggtctgaggctgccctctattgtacagagatactggggcagccacagggtactagaagagggatccctcaagaacaaaatcccatccagaaagcactgtctgttcccaataggcacagagatcttgccacaagtgtcctaactactgaagcctcttcatacctgcagaactgaggctctcttttccgacaggaagacatcgaggtggaaaggcagaaattacaagagacacaatcataataagtgacctggttcagaaagcatctttggtcatatggacctaggacttctcttccccacccagagatacctgggcaaacacagagcactggtaaggctatccaccacaaagagtgactagcctgggaagcccgttggacgctatggccatgagaatccctccacttttacccagagacattggagcagctggagggtaccagtatagggattctaacacaataatcctatctaggaaacacttttatctctatagatctaagaaacccctactctacctagcagcaccagcaccctagtctggggaactccttctgcccactcagaatgtaccatcaaggatttttgagagtaccagcatcactagataaaccaagcaggcctcaataacacgagaaatactctgaaaataaaactgtctttgggaccacagcccataaaagtagaatggcacctgtgtattgaactacgtatggtaaatacctgctaaaataaaagattgaaataagatccagattctgcatatataatggacaaaatgtccagagtaccatcaaaagtcgcctgcatactgagaaccaaaacaaacaaacaaaactagaatgagaaaagacatcgactaatgctatcacttagataaattagatgttgaaattatctgacaagaattttaaagtagaagtcaggccaggcgcagtggctcatgcccgtaatcccagcactttgggagaccccggcgaccggatcacctgaggtcaggagttcaagaccagcctggccaacatagtgaaaccctgtctcgactaaaaatataaaaattagctgggcatgatggtgtgtgcctgtaatcccagctactcaggaggctgaggcatgagggtctcttgaacccgggagagagaggttgcagtgaaccgagatcgcgccactgcactccagcctggaccacagagtgagactccgtctcaaaaaaaaaaaaaaaatgcaatagcatttatgatttctgcaaagaaaatgaaactcttacatataaaactaacaaaacatgcacagaatctgtatgataaaagttaccaagtgctagtaaaataaataaagaagacctaaatatatggagatacattatgttcatggattggaaaactcaccatagtaaagatgtgaattctctctaagttgatctatttttaagacaattcttacgaaaattttagcaatgtttttgaacttacacaggcttattataaaaattatataggatgtatagaatggcacaggacctatactagccaaaactattgaataaggaaaaattaattagagaaatcactcttactgttgttaaagttaattatatagcagcagtattctagacagtctgatactggtggtgtacagactcatatatcagtgaaacagaatagagagcccagaaatagatccacaaatatgcccaatttatttatttttacagcttaaagtataattgatatacaaaaatctgcacatatttaatgtatacaatttgatgagtttggacatattcatatacctgtgaaaccatcaccacaatcaaataacaaacatcaattccctggaaaagtttccttgtgtccctttgttttggacgaagcaggaatccagtaaggagggttagcctttttaataaatggtgttgtagtaatccaacacccataggcaaaaaacaaacaaaaaacaccttgatctaaacatcagaagaacttaaactgtaaaacttactcaaaaatagaacatatttgggatctaacgttaaagtgttcttagacttgacaccaaagtcgccatccataaaaggaaattttgataaagtgaacctcattaaaataaaaaacttttgctatgcaaaatattctgttaagaagaaatataaccgggcgtggtggctcgtgcctgttaataccatcactttgggaagctgaggcaagctggtcgcttacgctcaggagttcgagaccagcctggccaacatgatgaaactctgtctctagtaaaaatacaaaaattagctgggcgtagtggcgcacacctgtagtaccacctacttgggaagctgaggcatgagaatcgcttgagcccaggaggcagaggttgcagtgagtcgagatcataccactgcactctcaaaaaaagaaaaaaatgaaatacgagctacagactgggagaaaatattggcaaaccatatatctagatatcaagaactagtatcaaaactacataaagagctctcaaaactcaacattttaaaaatccaataagaaaatggacaaaagacaggcacagatgtttcaccaatgaagatatacagatggcatatataaatgcattaaaaaatgttcaacatcaacaaccattagtaaaatggaaattaaaaccaaagtgagatattattacctagtagtcaaaatggctaaaataagaaaatagacaccagatgctggcaaggaagcggagaaactgggtaaatcatatattgctggtgggactgttaaatggtatagccacactggaaaatagtttggcagttcattttcaaactaaaaatggacttagcatatgacacagcaattgccctcttaatcattcttaaaaaaatgaaaacttgttttcatacagaaacgtatccacaaatattcatagcagccttatagtaccaaaacacacaaaaaagtcccttgatatgtaattgcttaaaaaaaaaaaaaccctgtggtacatgcataccatggaatattacccagcaataaaaaggaattaactattggataaacctggtgtaatttatactgagtgaaaaaaaataacaatctctgcttaattttgttgttcacccaaaagtcattcaggagcaagttgtttggtttccatgtaattgtgtggttttgagaggtcctcttggtattgatttctatttttattccactgtggtccaagaatttgtttgcttttatttcaattttcgaaatttattgagattcgctttatggctgagcatgtggtttatcttgcagtacattctgtgtgcagatgagaagaatgtatattctgtggttttgggtaaagtagtatgtagatgtctattaggtctagttggtcaagagtcaaatttaatccagaatttctttgttagttttctgcctcagtgatcggtctaacactatcagtaggttgttgaagtcccccattattactgtgtggcttcctaagtgttttcgtaggtcttgaaaagtacttgatttaggacattggtgtgccaatgctgggtgcatatatatttatgatagttaaattttcttgttgaattacaccctttatcattatgtagtgaccttctttgtccttttttactttactgtttgtgggagtgtaaattaggtcggctactgtgaaaagcagtttggagatttctcgaagaactaaaagtaaggactaccatttgacccagcaatctcattactgggtttatacccaaaggaaaatagattattctaccaaaaatcatatgcactgggatgttcattacagcactgttcacaatagcaaagatgtggcatcaacctacatgcccacaatggttgattggctgaagaaaatatggtacatacacatcatgaaatcctatgcagcaataaaaaaagaaaaaaatcatatcctttgcaacaacattgatggagctggaggacattatcctaagcgaattaacacagaaacagaaaaccaagcaccacacgttctcacttataagtgggagctaaacactgagtacacatgaacataaagatgagaacagtagactctggggactacaatcgaggggagggaggaaggggcaaaggctgaaaagctacctattgggtactatgctcactacctgggtgatgacttcagttgtaccccagacttaaatatcacacaatatactcttgtaacaaacctgcatatataccccctggatgtaaaataaaagttgaaatgtaaaaaaggaaaagcaacaatctaaaatgaatgtatattgcatgtttccatttgtttttgcttgcttgtttgtttttgagacaggttctcactcttgcccaggctagagtgcagtggtgcgattgtagctcactgcagccttgaagtcctgggctcaagtaatactcctgcctcagctttctgaatagctgggactacaggcacacaccaccacacctggcccatttttaaaaattgttttgtgtagacagggtctcactatggtgacagaccaggatccctggtctccagcgatcctcccgccttgacttctcgaaatgctgagattacaggtgtgagccactgcatctggtctctatttgtgtaacatttctgaagtaacattattatggcaaatagatgagtggttgcccgcttgtgaactcctccaccttgagggctcagaggctggatccatagatatagcagaatgtgtttgtgtgtgtgtctatgaaaaggagtaggaggctgagggtgggaaaatgccatggaagcaaaatatgattgagcatgactagcttctcttgtgactgttcagcccaaaatgtccaggagtcataaacacgttgtgaaagaaatttccagggcatgcatctcataaggacgtgtctgcttgtgggttctcaggaaactgcagaccctgccctgcaagtctggcctctctcatggacagtcagagggccatgaggttgcattttttaaattgaggtaaaattcacataacataaaagtaaccattttaaagtgtacaattcaatagcatttcgtacattcacgatggtgtgcaaccatcatctctattttggtccaaaatattttcatcaccccaaaggcaccactgtatccatttatcagttagtccacactcctccctcacccagctgttggcaaccacgaaaccactttctgtctctaaggatttgggtgacctggtcttcatgtcaatggaatcatgctgtatgcagccccttgtgactggtttatttcactcagcataatgtgatatggattgggggaaggtggcaggtggcctataaaaggataacatggggtgtcttgaggtgatggtacatctaccacttgtgttgtgcttacgtgaagtgatctatgtggtaaaattgagtataactatatatacacacacacatacacacacaaatgtatacgtacataaatggtgaaatcagaagaaggtttatggattataccaatgtcaattcttttgatattataccgcagttttgcaagatgtaaatattgagtgagcctccgtgaagggtgcacaggaccttcaacctccctatacaattttttgaaacttcctgtgaacttgtagtttatcaaattaaaaagaaaaattcaaacagccttagtttagatctttaaagcctgatcctaatgaaattaaattcattttcatcccatgtatataatattgatgctcaccccaatgattcgtagattacatatttttgacaaagaaagaaatgtaataggttgttactttcttttttacttacaataccagtatcattttgctgaatttaattggggagctctatagaatacaacttgaaaaatactagtctaacttatgtcagatgttcaaattaatgtagcttagtttcgtgctctctggacttttagacttcatgattcaactaaatttaaaacaagttagaaacaaaccagagatcaaccttgagttgccattttcttactttgctaattagggcttctcaccattgtaatataaaagaaaaagaccctatcagcaccaaaacttggaaggacctgatcacagaattaaaaaatgaaataattaaaaaaaaatactccagcctcttcatgtgtttcctgtttcaccatggcctgatgtgaccgtcatcatgcactggaacctgaatttaaacgcatgttaatgaactcctcaaatggcatttaccgaatcagagaaaacttgaaagaaacttaactagcagtggtccatttgagtaaaaatataatacataaaaggaagatctcttgaattccaagcctgacaaaaatttcatctttattagatggaatactatatatcccattttaagaggtatgcatatgtacataaatcggaaatttgcaagtaatatatgtgattttaatgaacttcaaagaaaacaatcatacaattgtatagtcacaccacatatatatgattgtagtgttagtaatagtgttttctgagtgcaaatgatatgtatatgtacgtaaacatacacagagatgcatgcatatatggaatatatgtgtatgcaagtacatgtcatatgctttcccatgggcaaatgattatgccaatattttcccaattttctaggatgttaacactcagtctcttttgctcaattccatatttaattttagtcctgttgaatcattaggatgtctttcatttagtccaagtcttactaatctgagttccatagtccatcacaatcccactttttctttggaacacttcctaaatagcaaattgccaatgttaagctcccttcttctgaccttctctagcattaattacacgtacctcaggtgttgacacataattatggtatgtctcagcttgtcccagaaatgatttttagtgatacatgaacatacgctatatacttttttaaatagaaaaataattgctgacatttaaaacggatctgaacttttgcttagtattaattctattcctcacaaaatcccacattttctgcccatttttcagatgagaaaagccaaagttaaaagggcttaaagttcgtgttaactcagctagtcagtggtagagctgagatttatagccaggttttctctttcccatgtgtgactctccaccagtattcattgctaattttatgagcaaatttgtagaagcatgtattcttttgaatgaatataagaatgacatttactaggctgtaccatacactgattcaatcaaaccaactaatttgcacaaaagcttaagtgaaatctctaagatttcatgcagcctgaattttaaatttggcatgagataggagactgccctttgcttagaaaacaaacagcacaacacgacaaagacataaacttgccccaatgccattgtgcgggagagcataaacctgtggtgagtcaaggctatagaaattaggttctgtggcccatctaatttgttgcccatgtcaggggccagcatgctgtccaggatccagctcattgctggcttcctcgctatgaaggcaatagtcttaggatccttgttataaacgtttggaaaaagtttctgaggccctcaaatcttcctggaggaggcagatatacagatatagcacataccaggaatctcagtcatgggctcctcgatggcagatcccatcagtagtgtttgaaacacacagtttgtacatcataagccccaaattttgatggctagtactaaaaattattttcaaagttgtatttcagtatttacataactattgagaagtgatttcttttgagagactcaaacaacagaaccttattttagctaatgaatttgtacatgcaattccctaattttcatctccctggcagaatggtttctacactccaccttatcctatagactaattacaaattaaccttactaaatattcatttttttctcacttcttcctttgctcacaaatttctagcatgtgccttacatgcatgcattctagttcagactaagactctgacctttcatgccaccttggatcccaccttatttctcaatattctcaacatgaattttctaaatattttcagcttagacctttaaatctatcaagttataattagtgctgacttggtagtggctaatatcactgtaatacataaagtataatgaagaaaatatgtgtttaagaaatatgaacagtagaattctctaggatttaccatcaaactacctgtgtgacctagagctaattatataaatcctgagcttccattttttccagtaatagggagatgacattagatgattcttaacatactctttaatatctttgacaaaaaaaacttcagttatctgattgcttatcctacttgtgtttgttttgtattctcttatgtatgctgggaaatgtgaatccgtatacaatcactgaattatcataatgagattcatctcctggcactggtgctaagattgagaatttttgctattgatggacagagctgtggtattgtgaggcaatatttcttattatattgcttttgttgaagttagtaagtagtataatcctgaaagcaaaataaaatgtggagccaaacaaattgcctctcatatttacagagggcaggccatgcatattacttcacattatgcataactgaggttgtaaaatactgctgtagtgttttgatgattcaacagttagtgttcttcctcaatcaaagagctgatgttaacagaacttgccacaatacagcatatgctaattgcgtatggcttcatgtgggcccttcaaatataaaaagtcaaacttttagaaaccactcaataccagacattcaaaattctgggtggcagtaagggatatcatttgatatttgaagtcaagaaccggattagattagttagagatgcaggaatatttgcaaggtctgtatgacctttacataacatgatctactggaaacctgtttttctaaatgtttatatgtatgcacattgacatttaaaatgaaaacaatgggatgtaaatcctctcattaagatgggtgccactgactgattactattcttgaagcaatgttgtcctttttcttgcatggtaaatgcttcttttttaaaaaataaaaaagtcattgctatgtataaaatgcatcattcagagattataaccagggttggaagtatcatatttgaactttagcttagacaagtccagaacatgttacaacagggtcactgtttgatgttacattgttgttcagagctcaactgtgtgttaggcctggactgaggacacagtgacaccctttattgctgtattgcacagttacatctcagggtaatgcttagaggtgggatatgctaatatagtagtctaaaatgtgcaatcaataattcaataattatttagggagggtcagataccacgctatgtgttggaaatacagtggtaaacaagactatttttaccctcatggtgattaaaatccactgtttttttttaaattattttaggatttgtcaatattccaagggcctaccgcaaggaagagcaagtgactaaagcttgtttctaatctttctctttttattcactatttttacctttcattttgtctcacagacatgatttgacccagtaatgtctcaattctttcccagaacaatgtggagataaccagatcataaacagctccacctctaattacaatctgcgtcattttcttgtgtgtgtgtgttttttttttttttcattttgatgtcattaccatagggaggaatcccacaatggggcaacaatcaccatcagttcctccacaacatgtggtttcaaccatgactcttgagaaagactttagctctatctcagaatattcccaataatttgatttacttaaactttatggtgcaaataatgtaacccatttcacgattctatctgctttattcttctttcgtcctttttgttctttaacatgtgactgaattataaactgccccttgaattcatatcagtcacaaaataaccttgataattacttcactctacatggatttctctataaatacatttcctctctgatcaataccaaccaactcaacatcgtccaagttctccccaaatccaatgaactcttccttctttgaatttagaacacaaattctatctcatgtatatgcatataagatgtcattggaaaaatgggggaaaagatcttaaagggatcagggaggctgggtatggaggctcacgcctgtaatcccagcactttgggagactgaggcaggcggatcacctgaggtcaggagtttgagaccagcctggccaacatggtgaaaccctgtctctactaaaaatacaaaaattagtcaggcgtggtggtgggcacctgtaatcccagctactagggaggctgaggcaggagaatcgcttgaacccaggaggcagaggttgcagtgagctgagattgcattactgcactccagcctgggcaacagagtgagactctgtctcaaaaaaaataaaaatgaaaaagaacacacatttgctttgccactcacatggtcactattcatgttttaacttaaatcattgaatggtcttattgtgttttcttttttttggtttttttttttttggttttttttttgagacagagtctcgctttgtcgcccaggctggagtgtggtggcactatctcggctcaccacaacctccgcctctggggttcaagcaattctcctgcctcagcctcccaagtagctgggattacaggcacccgccacacacccggctaatttttatatttttagtagagacgaggtttcaccatgttggccaggctggtctgaaactcctgacctcaggtgatctgcctgccttggcctcccaaagtgctggaattacaggcatgagccaccgcgcccagccttgtgttttcatatctaatgtttcatcacatggaatgcagtgttcagagtggagattctaggatagacagatagataattgctaacagtgcttaaaaaatattcagcatttgataaatatttgcttttttttttttagttttaggtaaaattaaggatcattaattttttacacctttgatcatgttaacatataaaagattaaataataggcaataagtagcaataaaataggaagtttagtttttccaaaaagtttatgatacttttattatttaaaaagaaatatataaaataatcacttggacactatgaaaatgttggaactgtaacttagcaattagaaatgcattagatacaaatgctatacagttactttatattcaataaatgttcattgatagtaattgctaattttaagatcttcgagaaaatagatacaatattgccacaaataacacctttttaaatacaccttggaatatcagggttataaatagttctttgtttggatgacaaaagtcttttttctttagccacagctgttgataatataaataattcatttttaaagcaataaaaataaatacagccaagattatattcatttatgtttgggggccatatatatagtttatagcataaaaaagcagtgatcttatgttgaccctttctctaaaaattaatagtttattcagcttcctgtgttgaaattgtttttgtttatatactattcccttatattttgcttatatttgctctctttttctgaagaccaattattgaccataaaattagataatcttggaaggtgttaacatttcctagttgaggacgtgtgcaacgggatggattttgctgccgtctagtttcttctcaagtgtctaagctgaggcgttccctactaaaactcaccactgtctggaaatcaaggcacttaactctctgttgtgagggggttgattgtaaatgtcccaaggtattgcaaaagcagaaggacccacgtagagccatgcaaatgagagtgggtagatacattttatgagtgggtgcctcctattctcagccctggtgatttttagggtggtctcaggtgtgtctcagggtagagaggtatagagttgccattctttgtctgatttttttttttccttgtctattgctttaggataaactcagccttactttactcacagctacaattttggctctcaaaagatagtttgggaaaatgttttaaaaatctgactatttattgtttcttgatgttttcaacccttatacaataattttcttttccttgaatacccattgatgatatatgaaaaaaataaggaccagaaggtgaagtgggaattttaaaagtatcaagataaaaacataagcgttatctcactagagacataaacccaaatattgtgttgatcagggtagagtaaagaaagcattgcccctgttaaatcacttatagctacgatccacttggtaatcattataaatctgtgattatatatatatacatatatataagctccatatgattttatttattatgaccttttattttacgtatatattagactctgaagagccccagggtatttgtcccaagatctttgcaaaactccgaatttgcaaacatcactaaggcatataattctactcataaaatgcagtaaagtatggctaattacagagaccccatcagactcttgatgattgtataaacttaagtcatatataacactattaaaataaaatctactactaaacaaaccacattgtattatatcaccccaattaaatttttaactatgaacttgcctcaatctgaaaataattgtagtgagcgaataatgatacttgctgtgtaataggtgcctggcatgttttctttaaagtaggacacttttatttttaatttcaacttttattttacatacagggagtacacatgcagatttgttaaaacggtatattgcacccagatagtaagcatagtacccaataggtagcttttaactccttccccgccggtccctccccactctagtagtccacagtgtctgttgttctcatgtttatgtccgttgtgctcaatgtttagttcccatttataagtgagagcatgtggcatttggttttctgttcttgcattacttcgcttaatataatgtcctccagctccatccatgtcgctgcaaaggacatgattttgttcttttttatggctgcataggattccgtggtgtgtatgtactacattttctttatccagtcaaccattgatgagcttttaggttgattcgatatttttgctattgtgaattgtgtgacaaagaacataccagtgcatgtgtctttttgataaaatgatctattttcctttgggtatatactcagtaatgggattgctgaattgaatgatagatctgttttaagttctgtgagaaatctccaaactgcttgccacgggggctgaaataatttacattccaaccaacagtgtataagcactcccttttatctacagcctcaccagcgtttatcttttgattttttttttttttttttttttgtcacccaggctggagtgcaatggggcaatcctggctcactgcacctcaacctcctgggttcaaatgattctcatgctgcagcctccctagcagctgggattacagatgtgtaccaccacacccagctaatttttgtatttttactagagtcggggtttcaccattttggccagtctggtcttgaactcctggcctcatatgatcctcctgcctaagcctcctacagtgctgggattacaggcgcaagccactgcactcagcctttcttgacttttaaataatagccattctgtttggtgtgagatggtatctcattgtggttttgcttttcatttctctgatgattaatgatgatgagcatttcttcgtatgtttgttggtcgcttgcatgtcttcctttgagaagtgtttgttcatgtcttttgtccattttttaatattagacttttgtcaggtgcacagtttgtgaatattttctcccattctgtagattatctgtttactttgttgatagtttctttggctgtgcagaagctctttagtttaattaggtccctcttgtcaatttttatttttgttacaattacttttggggacttagccaaaaattctttgccggccgggcgcagtgcctcatgcctgtaatcccagcactttgggagaccaaggtgggtggattacccgaagccaggagttcgaaagcagcctgaccaacgtggcaaaaccctgtctctaccaaaaatacaaaaattagccgggtgtggtggcagacgcctgtaatcccagctacttgggaggctgaggcaggagaactgtttgaccccaggaggcagaggttgcaatgagtccagatcacaccactgtactccagcctgggcgacagagtgagactctgtcaaaaaaaaaaaaaaaattgccaatgccaatgtcaagaaggacatttcctaggtttgtttctaggatttgtagttttaggtcttacattaatatctttaatccaccatgagtttatttttgtatatggcaaaaggtagggatcaagtttcattcttctgcatatggctagccagtgatcctggcatcatttattgaataggaagtccttttaccattgcttgtttttgccagccttgtcgaaggctggttgaaggtgtatggctttatttctgtgttttctattctgttccattggtctatatgtctgtttctgtaccaatattatgctgtattggctactgtagtcttgtagcatagttggaagttctatagtgtgatgtactgtggtgtgaattattgtagggtgaagtactgtagtgtgatgcctccaattttgttcttgctgcttaggatggcttcggctatatgcgctcttttatttttttttttggttgcatatgaattttagaattgttttttctaattctgtgaggaatgaccttggtagtttgataaggacagcattgaatctataagttgttttgtgcagtatagccattttaattatattgtttcttccaatgagcatggaatgctttttcgtttatctgtgtttctttcaacaatgttttttaatactccttacagagatctttcagcatcttggttaggtgtattcctaggtatttcattttctttggctattgtaaatgggattgtgttcttcatttgactctcagcttggtcattattgttgtatagaaatgctattaatttttatatgttttactataaaaatatatttttatgtattgtatatcttgaaacctcgttaaaattgtttatcagttctagtagccttttggtggagtctttgggttttctaagtatagaatcataccgtcagtgaaaaaagatagtttgacttctttttctatttggatgcattttatttctttctcttgcctaattgctgtggctaggacttccagtactatgtttaataaaactggtgagagtgggcatccttgttttgttccagttctcagtgggaatcgttccaacttttgcccattcggtatgatgttggctatggatttgtcatagatggttcttattattttgaggtatgttccttcagtgcctagtctgttgagggtttttatcatgaagggatgttggattttattgaaaacttttttctgcattaaaataggacactttctgtctatgcttagcgtcttgtttattcttatctactttttacttgatgagatgtttcttcgcaattaaaaatatttaagtgacagtatagccacccatactttttattacagaaataaaaaatgcttcgtctctcatctgtcatttgatgaaaaaatccaagactttcttctaaaacctgcaaacatcataattcatatttgtattgcctccaactatcttctttcaagttaaccaccctttcaactttcactaaatctttaactcctatttgacgaggtattgaacgctgtactcaatgaaacacttttgcagcttctcttttggttatttatttttctttggttttctatagagaacataatggggttgaataattcaaaaatacaaactcttgctgatttcaacattgcacttttaattatattaaacttgtacttcctgggtcaaaaatcatctacgttgtaagactctttactttttctacctttttattgccagccttgtcagctatctttagggtagaagaagtgggagagatggtaaagcaatgagttgtgatttatttttctcaaaagaggaaagtttgcttcaaatcaaggaaatcaatacctacataaaaataaggggaggccaaggctgatttaataaagagaaagctagagtttcatcttgaatctctcactagcatagcgacttatgtatgaacctcagtaaatatcaatattctagacatagtggggcttcggtgtttctcaggaatagtcagacacatcagtatttaatctataatttaataaatccaagggtcttcttatctggaataaagctgactaaataatttagttgcttataaagcactaatatttagtactaaaatgacctgtcaatgttatttacatttattttatgttaactgaaagctatgttgctgataaagcttatattaagttcaggagttttaacgtggaattctattaatatggactcttaggactcaaagtgtttttcattaaatatcctggaacgtatgatataaaaattgagagatttatctttacgtattttgttctgcccatattggtattttcagcttattttctatcacagatttacatgggccaagactgaatcatagaatgggatattggaatttaatatagtttgttgatgctatggaatcattttttaaattatcaataacttattggatcttttattgccaaagtttcctaggatttcaattgaaatgcaaaaagaagaagtaaaagacattaacgtaaattctcagcagtttatacaaataaatttacaaggggcctatggaacaatacatgttggttttattttcaattgtagcaaaaaaataaataaataaaaggtagtttgccaacctctagagtgttgtaataatggcatcttttgacttttggagatttcatggaaattcttcaggtttccaacaagagccctccgggtgtgttgaattcatctgtacctgtgacagtcaggatctaggcaaaattcagaaaaacagtgagtacactaaatatagacttgccaagtctacagttctttagggaaaaaaaaattcctggactcagcctaaagtccccctaagttttagaggtcagtaatatttcaagtgactagaaaatctgaactaggtacatcatctttgttctcacacttagtatgattgttctcaccaagcatcattgcttttctcctttctgcataatttttccttactccttgattgccctttcactcttatgtgaccataaacctctgagtttccataatgtagacatgaaatttaatggactacattatgaaaatatttttttcaatgtcatcataatttctgtgccaggataacaagctcagaatatgggagtttatagtccagcatctctcccacaacctactatgactgtaaagaaattgtaacctgctccttatttccttcaatgctaatttctttgaaaattgattatgaatgccctccaatcaatatatgtaaaaaaaaaacctttatctttactaaaatacatatcctccagattcataacgaaggagaaaattctttggggaaagaagagtggagacccctcagtttcaattctgatccaactgactttattttgtccctagggttattttgctggttggtggcttaacattctaatcctagggtaaactaggacctgccttgccccttaacaacatgtgtaatcttaaatctggcccagtcaaaagttttaaacaagactttaggcggtaaaaactgaaagagaaataaaccaggaattaacaatgaactgataatttttgctgatgaactaccacttggcttacagagattagaacacatctttctaatcttatgacacaccaccctaggctgagagtcattctagcaccatcttcgtcacctactcccttgaaaggtacatgaagttttatttcctttcaaaattttatttttttatttttggtttcttgtttttagaattattatctggcaaggataggactttatccatggactcgacagtgcatttattttagaaaaggcgtgtatatttgtgcaatttatcctagcagagtaagttccaatatgtatatacaggccaaacaatgactataatatgtacatttttcttcattaactgtgttgattgcctgtgttctttcatccagcagaggcaaagtactaacatagaagactatccaaagtcttccagtagacttgtttagactagatttgaaagaagatcttaagtgtaagattatttttatactgttttcaacttgtatatttgtgcaatttgttgaacaaatgagaattagataaataattttaaaatataagtactttatgagtcagtttcccttttttgtaagttctgtttcccagacgtgcaaagcaatataattcttattatttcagggtataaattaaatttaacctgagcaaacaacttcttgtatgattgtattactatttttattactattatttttagagagactgatgacattctatcacttggtgtcatattcatctttttatagatatttgactaataatatgtaataatagtattatgaatggtgcccttaagtctgatgatttgcttaaggggctaaagaacaatatataaatggaaatctaaatagcactacttttaaaaagaataaacccatagaaagaaaattccatagctcaaaactaagaaactcaaaatccatataacacagaaagtaaaagggagcagttttctatatatatatatatatattttttaaaaagctctctgactctggttaaggatgcttgtgaatctaaaatgatgcatgttgataaagcactgtaatttaaagaagtctccagtcttgcctttaacagcaaaagcaagaacacattaaatatataggatctataagagaaatgaataaaaaatgttcaaatggaaatggtaaacatacagactagttcttaaagataggtcatgtatattcattttctaatttaaattgagctattttgatacatgtatatattttattattatgaaatatgtcaaacaactggaggatgactaaaaataatattaatataacattttgccgtacttgattttagaatggtggtaccaatttatgcctccaacagtagtgtatgcatcccccatttttcaaattcttatcaactagatattgacactttataatttttatcaatttgatgagtatgaaattatatctcatttgttttttgatcaatgtatcttttatattcattgaccctttattatttcctgctctgaatcatctgttcatgtcctttgccaatttttcaattgacttttggtctatttcttattttcatgtaattctttaggtattacagtttttccctttcactcatcggtctctaaataaacttggaaataatttttaggggtttttttgtgaatagtgaataattttgtgaattattttagagtaaataactgtcctaccatcattgtttaaatgtctaccttttctctattcacctgtagtgtcacctctgttttgcatcgagattagtatatacatgtacattagattagtatgtacattagtatttctgggcatctttttttgttctgttcttcatttgccaattcctgtgccagtactataatatgtctcaattaccatagatttatatttagccctgacatgtggtagggccagacaccctaacttgtttttcttcaaaactttcttagataaaccttgccctttgtctatcatcagttctataaaattatcagccattatctttaaatctggcttctctgcaattccattcattctcttctttaggaactcttattgtcgtataatattgtccatcttttatgtccttagtattttatttttaacatttacttgcctccctgtgttacgttctggatgaattcttcattagtatcttctaattcactaattttatcttcttgttcaatccagatacttaagctgtttatttctttaaaattgattcatttactacatttttcatttccaacatttatagcttttttcttctcaatatgaaattattttaatttctacatgcttttgttttataactacttgttctttttattgagttttatcttttaattttattgttgagaattctaaacatattatttaaaaatgttcttcagacatctatatgagaataatttcatctagactgaactcatggttgaatcattgtggttgtggtggtggtggtggtggtggtggtggtggttttctgccttttttaggcctttatttattcacagatttctggagcatttagagtaaaagggtttgcttttattgtcattgtgtttattatatctgttccaccactttgctgttgtccccatctggcccctggaatagctgcctagattcagatagtctactaccacgtggagtgctgtttgtggtgataattaattagaaatattgaagattcagtactcaaattcatttgttttgggctgcttctgccttcatggcgtgtgtgtgtgtgtgtgtgtgtgtgtgtgtgtgtgtgtgttcttcccgtatctctagtgtaacagattcctaacataataggctctcaggcagcaggtcagcaaaatttttaagacatttttcttttcaagaatgattgctgggtgaacttttgccataacttgtgacttcaagcagtgatcttaattctagtttatcctgtacatgtggactcttagtgaaggaatctaaatgcgaagccactacccatggggggaaaatagtctgtcaggactgcagctactgtgtctgatatgtggaggtgccaagattgtgtctaagtcctactgtgttataacactctttctttttttatattttctttcttattcttctatatattaaataagtgtcaagtcatgaaatttccatgccatcttaactgaagaggtttaaatgttttatatttaatctcccgttatttattgactttacaatgtcaaattaaaactcacattcaggcatatactactaaaatactaatagaagacaaactaggatcattatgtttagggaaaaatacacacatactatcatgacacagtacaattaacataaaaccaaacaccagaggtttctcttattaaagctgaattttaattgtttttatgtatctatattactgtctataatacaggttcttgagaattaggactgctgttgtgtgtgtaagtgtggatcgcttttgttgtaatttttgatcatacttctggaaactagcatgatagctggaaaacaggtccacaaatattaattgaatcaatgactgtttaggagacacacaggcatagatgcagcttctgtactacagtaccttacaacctatcatcgacaaaatacaaaggcaataagtactttttaaaaatatataattgtataaagtgatgagcaagaaaacagaatgaataagaatgtgtaatagtaaattaatcccatttcacttttgataggcttttatataaagctgatacaaaatactttttaaattctcagtgaggcatttgatgagtttcctaataatatttatgtaaatataatagcaagtatacaatcttctctatattttgtaacagtaatgactatccctttaaaaggtatctatttgattcagaggttattatttttctcttgtcttcgctaattttaattctctgatgatgttttgagaacacatcacttgaagatttttagtagggcagtgctgttgtctatgttactgaaaagtaactggactggagaatgtgaacatgcactcctgttcagtatttggattttaggagtgtgtcgctgattcttgaagaatttttttaaaatctttttaagaaagcatcattattgttacttaaaaatatttacctgttaagcacctcttagaatggccaaaatccaaaacactgacaacatcaaatgctgaccaggttatgtaacaacaaaatctctttcattgctggtgggaatgcaaaagggtacagcctctttggaaaacaatttggcagtttctcacaaaactaaacacacacttatcatatgatctagcaattgtactccttggtatttacccagataagcttaaaacatatccacacaaaaacctgagtgcaaatatttataattattcataattgaccaaacttgtaaacaatcaagctctccttccataggtgagtgaatgaatgaatgaacaggtacatgcagccaatagaatattattcaggacctttgaaatgagctataaagccatgaaaaaagaccaacaaatatgggggaactgtaagtgcatattactaagtgaaagaagctaatttgaaagggttacatactgttgaatttcgactatgtggcattctagaaatggcaaaactatgatcacagtaaacagatgagtggtttcagtggttgccaggggttgcggcaggaggtggaatgtatagacagattacagaagatctttaaggcagtgattatatattatccgaaatgcttgcgaccagaagtgtttcagatttcctttttttttttggggggggggggcgattttgaaatatttacattacacttaccagttgagcatcccaaatctgaaaatttgaaatccaaaatgctccaatgagcatttgctttggacatcttatcagcacttcaaaagttttgaattttggagcatttgaattttagatttttagatttgagatgttcaacctgtatgattctatagtggtggacacatcgttgaatacttgcccaaacctatagcatgtacaacactgagtgaaacctaatgtaatctatggactttggctgacattgtatcaatgtaggctcatcaattgtaacataccattgtggtatgaagttttgatggtgggggaagctgtatgttcgtagggctagatggtatatgagaaacctctcttccttccacttagtcctgctgtgaacgtaaaactcctctaaaaaacaaagtctatttttaaaaaaacatttactaggacaaaacatgtttttagcacaattttttaaacgcacagtaaagcgccatatgctcatgagcttcctttggaagcgcccatcttcaaacaagtatattaagataagttttgtccatatcatagcaggtattttattttcccattctgcatatatttaacatggtaattaattcagcctggtattactctggctgttattcaaagcctcatatatgtttgctaatttgtcacttgctcctcatacaacatcttaactatttaataagcagttaccaaagtctagacagtcctgctccagcatgagttttaattgagtatgtactacataagacaattaagatccgaacaaaccatcagcggcagatgatcctacagttatgaggaaagcttctgtaggagtgactgtgtaaaatgatgaaagcaaagggtcttggaatatcatatatatttatatcagggctctaaagacatactaggataaagtggagaaaggcatctctagggctatcttctgtcattttgttgccagtcgttttaccatcaaagcaatatttttagaaaaaggtttccatcatcatttaccaatattttagggaatctttaaagtctaagaacaaatcagaaggtaataataatattgaaaaattattccaaaatgtttagtacgttgtttgtcttgtttcatcaaaactatttgtagtagcagaacttttgttggtggttctgtaactgatgattagctttcagtgcaagtatttttcaggtaactgtgtgaaaatatttttaaacatttacactatgtttccaaaccggaacactttggtatagttatacctgtgaaataaatgacattgtgtaaaacaatatagcggatcttttaaagtgagttgacaggatgacagtacagttactcacagttcaaactaccacaatatagaatgtaatgagccataatgctattatttttcacttcagaattttaatattgtgttttgtacagttcttaaaatgtcatgcataaaacattgtgctgaaacaatagtgatttgtatatttattacgtcagtaggacccaacagtctaataacgataggaaacaatggaaatttttcctcagacttttttggaaactggttacacaaagaattgctttgggaaggatctaatgtttgaaaagcattctggcttgatctttagatacaacagtttgatcttttgtgcaactgagagcctctatataaatgcagctggagtgagtagggtatttgaggctatggcaccttcagtgatagggtgatttttgtcttactcatcctcagtgccaaccagaaaataattacattcctctaatagtgaattgaccactaactaaatctgaaggacaagaagcttggaaaaatataactgtgcaaaatggcttatcgaacttaccattttatagaagttgaacatggatctctaataccttggacttgcttctaatatggtatcacatagtttcatcaccgtgattactaatggatggagtgatatattttatttccaagtattaataaaacagcaaattatcataattgaataagaaggatgctacattgcatatttaataacgtatatgtgacactggacaagtaaggatgaattaatctcttggaataaaccaccattgaaagagcgtttctgtcaagtaatgtcatttactctccttattaacaaacagagcaattctgttggatcacttagcatggtgagcttattaggaaaatcacattggtttcagcaaaagactcatgtgacctttctaaatgaaaatagcatgatgctaaaaaaaattggagggaggaccatctctacatacagaatggtctttgcaatcaactaccatattgagaaaaaacttttattttttatgtttagaatatagaagggtttctgtttctcttttaattaaaaggaacgaaagtggtatttacattaaatgcaaatagcaccttctttcctacagtgagtgtttctcagaaatggacacattttcccttctcggtctccagaaaccccttgatcacaccaaaagagcaagtatggctttctgaaaatagaaaaattgtaggtaggttatacttacagtccctgaatttttgcacatatcgtaaaatggtgactagaattgttcaagatgtgttactccgttacacgtttacaaaggggctgaagagatatagatgttgcattttattaatactaaagaagaaactcagttataggaagtaacaggaaaaatgaatagtggtctgcatagtaacaatatcataatactgtaaagaagaaacattgcacttgccatttaataattgagaaaatctagagtgaattattttgagtaagatacacttactattaattttttctaaaatgtatttctctaactacatgttagttcaggtgaaacaaaaaatgagaatttaataaatgtttatatctgaaatataaaattaatatgtaaatataccttcttttgagatgacaggtgtacattctcggttgaaaagtaggtttctattttaaatcaagattaatgtatagtttatgattaatttaaaatataaatgttatatttcctctcatcctagaacagaataaaaagattttgaaggatttgtattaatcaaataagctagaagccacgcttttctaggaaaaatattaagagaaatgtaaccatgcttgacgctaggatggtgttaccatcaaactaaagcataatttcctctttctgtgactgttgaatactaatttttaaacattaggaattgtctattatactttattatatcatgactactcaatgttttgacatgaaattgtccctaatatatttgctaatatttgaaactagttcaaaattatctggcaagaaatttgtggctttatccatatgatgtatagcatgctagcttgtctatgcagaaggacaataattagacaattcagagaaggtgataatatttatagcttattatagaaatatatgtaaagactttcttgattgtaaacataaatattataaagtataactgagcttttgagattatcaggaaaccaaagtatctacaaaatctaaactttcactcaaacccatggtcagactgtcaatactaaattgaaaaattagactcctacacaagttgtgaagtttttctttcttcatgcatatgattacagaaaggcaggtatggatggcctaatttgtggaataaatccaaccacttttgtaacagctcagataacaaaaatcactaatagagaatgtgatattttatcaaattggctttgtttttgtttttattgtagcattgcataagatcaaagaagaaaataaatgattcaattaaaggaaaaatactgaaaggcaggacacagaaaaagagagttttagatgtggaattcttttgagagatcatctagtctgtttacagatatgaaatctggggaaacacagaggtgaattgtccaaggctttgcagttattgaagcatcaaaatcatacatatatcctgcttctaaacctccctctcagtgttcttttcatctatggttttaaaataatcaagtggtatttgttaagaagttagaattttaagatatggattatataaatccgatttatatggtcaagtttgactaatattagtaaatttgattgttagcaacataaacatttctggagtacctttcctataaaatacggatgacaatctcctttagcattgttattccgtctgggataaaaagcacttcccacatttatttagaaatgtaatggatgtgttcatttaactccaatgatataataattctctattgactacattcagtataacagtgatgtttatttggaattccccttggacttccacttagatttgttaaatatgaggtgatttgaatgacttaactaatgacatttgctcaatgtcttaagtttttcttgatagttggtaaatatctgttcatgatcaagagtgttacaccaagaatttactttcaatagagtgccatagatatcacttactgtgcattctctgtgtttatgtgtaaacatataatagatattcaaaagtaatataacctctccacattataaaataatgcacaaatataaagaaggataatatataagaaaataaaatggtgtaattgcacacgtgaggtgttctattttatgtcaaactatttcttaaaatcattcaaatatcttttaggttactaaaggagcttttgtcatatgaaaatcatatgaatagaccatcacattttgcaataagaagaaaaaaaaatttaactcatgaaatcaaaacctttatccaaaaccacctttgttcctcaatcttgtccaaattttgggtttttctaaacaagttttaataactcttattattttatatatttaccaaagcaatcagtctgtataagatttacattttagcatgctgttttttctctgatttatttctttcgaatcatcacatcaaataataaatcttaaagttgtcaattaaaattgatttcaaatgttttgtatctccccactattataagaactatattgtgaagtctatatcaaaatatagggggaaaagcctaaggtcgcaagtgaaaattttttttctaagacacattcaaaaatttgctaaccatttttgcatatctctaatttgccccagaccccaaattttaggataatgataaacttttagaatttgttaatacaatttttataattgaatatatcatatcttttttcaagtctatgttttttaataaacctgagagcaaatatttaaaatctcttttaaaagcatccaaatcgtaacaaaaagaactgtacagtgtaaacaatagtgtatgctccagacaaacaaagccttgtgatgtgaaataaagcaaatttgtgtataattaagcattaccagtactgttaaaatataggtttataaactggcaagaatatcgggaacatattctcagatattcaaatgcaaaaatggaaaatatttcatttttaacggtgaaattttctgctaactgtttacaaaataatatgtacttatatatagaaatgagtataagctattttcttttaatggctagtttctcattaaagggatcatgacattaggcatattaagagtttagtttggaaactattttaaaatattaataaagagctattgctaattaatgatgggattttccagttttatacatgaataaattactattaaaataacaaaaattgataactaagaatggggattagagtttgaaaaatttcattagtatttatggatttattggtttccctcattagagactagatgaccatcagagacggtgatatttttacttcataaccgcttatacctgttgtaaaatatcgagaggccatcagaattttgtcacttagagaagggactggaaatttttttaggtattcttttgccaagcatacttgctctatttaatggatgagaagtaaagctagacagattttcttcagttaaactttcaatatctccacagtctacagtacattaaaattcactcattgaaatttttttgtttgactctataatgataaatgtatctatttttagcattaataaaatggatgaagctttaactctataataaattcttccactttaaattctatacagcttgtctttccctgattctctagttctattaaattagtagaagtagttcgtgtcttcataatcaattgttatcaagaactaatatgtctaaataaacctgtagataaatgtccattcattattcttggtccataccaaagttccaattattatttgcagtatgtacctgacatatacatactaaaatgggttcaagtatagtttctcaataggaggtggatccttttattgatacataatagttgtacatattttgaggtcacataagattttgctgtgtttatgtaatgtataatgatcaaatcaggataattgggatactcatcacctcaaacccttaggagatggatactctcttgatgttcgatatttttagttttactttgattttatttttgtcatggcctcatttcaaactgactcataatccagaattatccaactaaatcataacagaaagtattattggctaaagtgaatcaagaaaaaatttagcattgttgctgtcatatacaaacatgtaagaagtttctttcacattttaaatataaatataaatgactgattctgggtttttcccttatgaggaaatacctaagcaacattaagctaagcaaataaatggttatttgtgtgatgatcttctaaatgtgtgtgtatgtatatattgctttaataaaaatttcagatggtatatcattttttaagtagcgaaattatcatagtgacttgtgaatagcaaaatgcaaaccaatgtggcattggatcctctccaggatgtgatgagtcacctgtcaccccccccattcaaccccaaatcccctacattctcagggaggactagttcttcctaaggctaacatgaatgccacatgttttaaagcaaagaatgtagaacatcaagttttaaatgtcatgtccattaatgagattagttaactgtccctttgcaagttcaaggaacaaagaaagccctgtggagagcagagagaagacagataggtggctgttaatgataagaggcaaaatttggtaaagggaaggcaacttaagctaaaggaagtgagtgaggtggatagaccccactaaaagacaaaaggagatagtacttaagaaaaaaatctgtcagtatctctctctggtagctgccttgtttttgttttgttttatttttgtttgttttatgctttcctgtaaatcatctcaaaatatctgactgtagcttcctctttcactcatttcattctgtaaattgtttctcaataccatgcctcttgaacacgagaaaacgctgtttctagcttcatcttcaagatatttatttccatttgtaaaaagaaagctgaaacatttttataggctacctcagagattatatactaacattttagtaacatgttctaaatgcttgagtagtttaagtattgacataaaattgctttctatttcagttggaattgtttgaatcctcagtaaatgtaaactattgtagctctaagggtatccccaactagaaagttcttatttcacacattaacatttgctgctttcttcacaagttaaactaaacatattttccttatttatttatttcactggaattcctttaagacattattttctcaagatgtggcccacaagccacctgcactgccaaccacaggttttctcagttggtatctctggggagaagaatcccttgatagtataaaaaatatccaatataccattatattaaaaaactagattggtcatatatctactgcatataacactgatggtcatatatctattgcatgtaacactatatacctgaataccagataaatgtagctcgggaaaaaaggtgaattatttcatgtagcaaggagtgcagaggtagcttttctgtcattggtttaggcatctcaatttcactccattccaggcagtccctggcagaaaaagaacaggatcaacatgattagcctggccaatcatgatttgttctttgggatgagtacattgcttgtgcacagtctcccttgatacccgaatggaattggagttctgttgacaaagaggaggaaactggatgggcaggtctagagtttatctggaatttgaattgtgcatttttagacatagagaaagaaatgcatttttagacatagacaaagaaataagtaggttttattatagtacgcactaacttaggtcagtttctatgtttctgtgactttcttaatcttacataattacctttatcttattaattaattaatttttatttttgctacatgaataaatacattcaagagggcacacaataaaatatagtaatatataattccaaagtacgggctcagcaagtagaaaaaataaacaccatgatttgaaagcattgatgtaaaacttgatctttaccattgctaattagtcagccagaaaatatatataggaaatggcttagccctacatataaaatgtgattctcattcttagggttatctatgcatcttttatctggtactactttttatatctcaatatttgacatcttttttgccccatttcaaaatataaatttatttattttctttacaactgcattcctctgcacaaataaaaaatatataatttagaatatatagtagagttttgataattatatttatattttaaatggttttgatatgaatagttacttctattctccacctgtttaacaaatttgatatttggaggcaaatttccatatatttgaataaatatgatagttaagaaagcattactttctatttgccaaaacttaccttgaattaaaaatagacaatacgtatttatatatgtgtttgtatatatgtatatatgtttgtgatttgtaatggttttgtatatgtgtgtcttctaatacaagggtccccaacccctgggccaaggaccggtactggtctgtggcctgttaggaacccagctgcacagcaggaggtgagcagaaggtgagcaaacattactgcctgagctctgcctcctgtcatatcagtggcagcattagattctcataggagagccaaccctactgtgaactgcgcatgtgagggaaataagttgcaggctccttatatgaatctaatgcctaatgagctgaggtggaacagtttcaaccccaaaccacaacccctatacccccagattttcacctcccccaaacccctgtctgtggaataattgtcttccacaaaactgttccctagtgccaaaaaggttggggaccactgttctaatacacacatacacacacatacatacatacaagtgtacattgatatatatatatatatatatatatataatgaatagtttactactatgtgggctattatacagaactgaaaaaagaaccacaacaacacaaaacaatatcgatgaatgttagcagtataatatccaaagaaaaaaataaatccaacattataattcaaaaaacccaatattaaatccaataaatttaataaaaatgtcagatggtgcattctctgagtacagtatcccttgatacctgaatggaacatactacatggtaaatatcatctccataaagccaaacatattgaaaataaaattttagtctttaggaataatatgtgtgtgtttaataaacatataaaaagaaaagaaatgatgaagaaattattcaaaactgtgttacttcatttggggagaggtagggaatgtttgcaaaagtgcaacatgattggacataggttattttcaattccttgcatttttgcaggagtaaggagtgtttgcagctgtttcctacgttgttaaaaatgggcaggccaagagtgcaatgtatctttaacataatgtcgtaagtaatatcccaatcaaatcaaatttatgtaagtatgtcttatgaagtaaatgcaataatgatatggggagcataaatgctacataatttgaatttaaatgagagcaattggccaggcatggtggctcatgcctgtaataccagcactttgggaggccaaggtgggcagatcacctaaggtcaggagttcgagaccagcctggccaacgtggtgaaacccggtctctactgaaaatacaaaaattagccaggtgtggtggcagatgcctgtcatcccagctactagggaggctgaggcaggagaatggcttgaacccaggaggtggaggtcgcaatgagccgagattgtgccattgcactccagcctgggcaacaagagcaaaactccatctcaaaaataaataaataaaaataaataaatttgagcgataataaagggtggttatttgggctttgtatggaaagttacttattttcatacagctttctatacatacaaatttctgtcaataacaagattgaagaaacatagagtaataaatacaaccctctgcattctgcaattttcctaattcaaagttacattttcacatgctgaattgcatttattggctttatgtttaatactaagcttggcacatactatataccaaaaataattttaattttcaaattgttgattttttaagttgttgccaatgatttatctaatttgctcatgattctggatcaatcatttctgggttgtttcagcaaatcgttaagaacatatctaaattagagttatatattattatgtatagctgtatcatttactgaggaattactaacaatacttttcattttctagataaaattcaattgataggataattttctcttcctctggtaattatgccataaataagcatacttctaacatttattcctgtgaaagatggagagtattttttaataactacattcatgaatgtcactttctaattttcagagtttctggtctgtaaaaaaatgacaattagttttactaaaaataaaatgtgagaataaaaatgggtgaaaaaataaaatagagcacacaacatactcctatctgtgaaacttgtttttaaaacaaaaataaaataatgataatttcctcatagaaaaaaatggaaaattaggatttttaggtgaaaaattaaaagttaattttcttagaaaatattatttattctcgcggccaggcgcagtggctcacgcctgtaatcccagcactttgggaggctgaggtgggcggatcatgaggtcaggagatcgagaccatcctggctaacacggtgaaaccacgtctatactaaaaatacaaaaaattagtcaggcgtggtggcgggtgcctgtagtcgcagctactggggaggctgaggcaggagaatggtgtgaacccgggaggcggagcttacagtgagctgagatcgcgccaccgcactccagcctgggccacagagcgaggctccatctcaaaaaaataaataagtaaataaataaataaatacaataaaatattatttattctccattatgagcatgagtcttacagtatggcaatcacttgtatttatacagaatggacataaaaatgaatattttgaataaccaacttaatttgagagtaaattttgatataacttgtcatagttatgtaaattattttagggtagttgataattgtgttctatgaattaaattcaactatcatgcaacccagtcttaatttaccaacataaaaatgcttatagcatttgttagttaataaatatacttcatttgcatctacagctgtgcataaaatcactattcaggatgagtcacatatatttttaaatatctatcacaagtagttagtgcaaataacttaaaacaaaatatattttctgaattagagtctatgagaaattttagccacattaagtagaccaatttgggattaaataacaataacaacaatgataataataatttatccattgaatgatatttacaattggttttatagtagaacaactataagatacaattttcaatacacttctcattcttctaaacatatggagtacagaagttaaatatattctaggaattgtactaacagagtattttatatttcaatctcaaaaattaaaaatatttccccaaagctaaatatgataaattttcaataggcaaattgaatgaacatgtatttgctactaaattttaagaatataagaaacaaaatatataagaaaattcaggttatctgttacattgtaatgcttgtaatggatgtgacggataggattttggttagtttatcaacccctggctgtcttacttaaaggactgattcggaatataaaagtttaactacatgtgatgtgacttgagtattgctcccaagctacctttaactggactcaaggaagaagaaaccatattcaactaaaattgataaaagttcattttcaatgtagaataattcatttatcattcagtgttcttgaagcagtttaaggctttgtttaagtactaaaacagagtttgaagaccgagataattggccgggcatggtggctcatgcccgtaatgccagcactttgggaagctgaggtgggcagatcatgaggtcaggagttcgagaccagcctgacaagcatggtgaagccccgtctctactaaaactacaaaaattagctgggggtggtggtgtgcgcctgtaatcccagctattcaggaggctgaggcaggagagtctcttgaacccggaaggtggacgttgcagtgagctgaggtcgcgccaccacactccagcctgggcaacagagcgagattccatctcaaaaaaacaaaacaaaacaaacaaacaagcaaaaaaaaccaaaaatgaaataatttctctaatttcatttaatgcctgagagaatgattcttatgtataaatttttaaatggctacttatagacattgatacaattatactttattctgttcatcagtgtcctaaattgtcaagtaacagaattcactatctctagggtaaacagtaagggccacactaaagataatatcaaagactcttggggagcagaagaattagaaatggtggcaaagagctaggagcaacattagaaacacaacacagccaggaaggcaacgatatcactggaactgtataaatgaaacaactctgttgccactgttagcttgttgaccctgatgatgctgaggactagatggcagaatggtcaccacagcaaccccagggaggcccaggtgtgttctgcactggccagattagactaaatgctcactgcctcaggctgtttagtactgtatcttaatatcacatcaggacatttgatcagtgaaacaagtttctcagatattccaccttgaaaaagcaggattcataattgagcatctatcaaatgtaatgtacgtatttaaaaacgattaggtcacaaccaatggggatatgtactacatttcattaacatatattgaatactagttcaaatacttctaacattaattcctagagtattaatgtaacatgtcagtatggaaaaaaattccttcatgaaccctgaaattaaagagtctacagtttcagttttgtagtgttcctagttacagaagctagatttttatttttttacaggaaaatacattaggttttgggtacaacatagatcatattgttattcagttttcattctgttcttaatggattacaaaaatatgttcagtttagcaaatttttctttaaaaatgtggaatcatgcaaaactcatcaacaaagttgtaaatttacaagtattacttctatgatacaaagtagagtctactgactatttagaagtagccactgcattcatttaaactgagattctagcacttcatgcaattctgttaaaattcatagttgttttggccagccagttctctagactgaggcccatacttggacttcatcacaaatcattcataacttcagcagaacaagacaacaacacagaatagatctagttcaccttctaaattttccttttattttttggtaagtgaataatggaaaaattataggtttagtgactgattattaacaaagaacataaataaatgcaacatatgtagttttattaatttcatcagttttgactattcagagtgagtgtttctattcactttccaattaactcccagctttttcctaagaatgatatttcgggtagtgatttttctttttttttttttacttttcagagccctgaaaaaatagccattaacagttactttaactatcagtacaatgtataataaactagtcttattgaaatgcattagtttaaaacaatactgaaggagcaaaaatgtctatatttaaaacctcactccagataaacagacttctgttgtaataaaagttaagctagcttattttatgtttaaaaatatggattaaatcatgaacaggaaggaagtcacatatttgaaaatgaaatatacaaatgatgtgcttttttaagtggtagcaggaagaatatgccaaaaagttgtgtttaacccatttctcatgatacacttagaaaagttatttaactcacaaataaatgctgataatttgtttcaaaagcattttatgcatgacttgaagacactagggcttgtcaatatatattaattgtatagcaagttataaaatgaagcttcattgaattctattaggtcacatcaaaatacactcctaccagataaattcttccatttcgttttgtttctatggcatttgggaagctcagctgtgctcaagaaactctgttcctgtaaacaggttagatattaatgtcttctttattagtcttcaagagaagtaaatctgagaccttgcctactcagttaaaaaactacgaatcaaatcaaacaatttattcacaattgaccatttcggggaaaatcaaaccaagcaaaaggatcatttgaaatcaaataactaaacttgcaaactcagagtagaaatagcttgagttgaactcagccttaaaaatatttattttacttttttgttatgtacttgtatttgaccaagctaacctgataccatccttatatagttctgagcaaactggtatagatatccatttacttttttcagattttatcgtaatcatattgttttcggaatcctttaaaattatataaaaagcagcaacactttaattttgctgactttctcacttattaataagatccaacttatataatcagctgtctataccagtggttgacagaagtatggcattttcttcaataaagcaagaattatactggatggggaaaagttgaaagcttttcctctaagatctggcacaagacgaggatactcactgtctccacttctattcaacacagtcctggaagtaattaggcaagaagaataaacaaaaggcatccaaataggaaaaaaagaagttaagttatccctgtgtgccgatgacataatgttatagaacccctatttttatttttaaaaatgttatttgtatatatttaaggaatacaagtgtaattttattttagggcattcatcacctgaataatatgcattgtacacattaagtaatttctcatcatacaaccccctcccatgcctccacccttctgattccccattgtcaatcattccacactctactttcaaatgtacacattattttgctcccacatgtaagtgagaacatgcagtatttgtctttcagtgtctgaattgtttcacttaagataatggcctccggttccatccatgttgttgcaaaagacatgattttattccttttgtggctaaataatgttttattgtgtatatataccacattttcctcatccaatcaacttaagtaaattctatatatttgctattgtgaatagtgctgcagtaaacatatgagtgaggtatctttttaatataattatttcttttcatttgggtagatacccagttgtgagaatactatatcaaatggtagctctatttttaattcttagagaaatctccattctatttttcatagatgtactaatttacattgtcaccaaccgtatttaagcattgtcttttctccatatccttgccaacatgtggagatttttttgtttatttgttttttaataatagccattttgactggtgtaaaaaattccaccaaaaactgttagaaataataaacaaattcagtaaaattgcaggatacaaaatcaacatatcagtagcattcccatagcaatctatctgaaaaagaaatccagacctgaaactataaaaattctagaagataacattggaaaaacccttctagacattggcttaggcaaggatttcatgaccaagaacccaaaagcaaatgcagtaaaaacaaagataaatagctggggcctaatgaaactaaagagcttttgcagggcaaaaggaacagtcagcagagtaaacaaacagacaacacacagagcggtagaaaatcttcacaatctatacatctgacagaggactaatatccagaatctacaatgaacacaaacaaatcagtaagaaggaaacaaacaatcccatcaaaaagtgttctaaggatatgaatagacaattccctaaagaagatctacagatggccaacaaacatatgaaaaaatgctcaacatcactaatgatcagggaaatgcaaatcaaaaccacgatgtgataccaccttactcctgcaagaatggccataatcaaaaaatcaaaaaacggtagatgttggcatggatgtggtgatcagggaacacttctacactgctggtggggatgtagactagtatacaaccgctatggaaaacagtgtggagattccttaaataactaaaagtagaactaccatttgattcagcaatcccactaccagatatctacccagacaaaaataagttattatatgtaaaagatacttgcacacacaagtttacagcaacacaaagcgcaattgcaaaatcgtggaaccaacccaaaggcccatcaatcaacgagtggataaagagaaactgtggtataactgtggccacaaaaaggaagaaattaacagcatttgcagtgacctggatgagattggagactattattctaagtgaagtaactcaggaatggaaaaccaaacatcgtgtgttctcactgatatgtaggagataagctataagaacacaaaggcataagaataatacaatggactttggggacttggggagaagagttgggggaggcaagggataaaagactacaaatacggtgctgtgtatactgcttgggtgatgggtgcaccaaaatctcacaaatcaccactaaagaacttagtcatgcaatcaaataccacctgtaccccaataacttagggaaaataaaaaataaatttttaaaaaatcccatttacaatagctacaaaaaatacttaggaactggccgggcacggtggctcacgcctgtaatcccatcactttgggaggccgaggttggcggatcacctgaggtcaggagtttgaaaccagactgaccaacgtggtgaagccctgtctctactaaaaatacaaaaattagcctaatgtggaggcacacacctgtaatcccagctacctgggtggccgaggcatgagaatcgctggaatccaggaggcagaggttgcagtgagcagagatcatgacactgcactccagactgggcgacagagcaagactctgtcctctgtccacccgcccccacaaaaaaaggaataaatttaaccaaagaagtgaaagacctggaaactgtaagacattgatgaaagcaattgaagaagccacaaataaatggaaaggtattctgtgttcatgtattggaagaattaatattgttaaaattcctacactacccaaagctttctacagtcaatgcaatctttatcaaaacaccagtgacattttttacagaaattggaaccacaaaagagcttgaagacccaaaataatgttgagcaaaaagaacaaaactggtgtcatcacactacttgacaccaaaatatactacaaagctatggtaaccaaaacagatggtgctggcataaaaacagacacatagaccaatggaataaaacagaggccagaaataaatccacagaattatagccagctgattttcaacaatggtaccaggtatatccaatgcgaaaagaacaatcttctcaataaatggtgctggaaaaaatagatatccacatgcagaaaaaattagacccttatatcagaccatgtacaaaaattaactcataatggattaaaggcataaacgtaagacctgaaactataagactaccagaaggaaacataagggaagtctccatgactatgatctgggcaaaaattttctggatatgacctcaaaagcacaggaaacaaaaccaaatatagacaaatgggattacatcaaactcaaaaagttctgcacagtaaaggaaagaatcaacagagtgaagagaaaacctacagaatgggatgaaatatttgtacaccatacatcttataaggggttagtagccaaaatagatcagtaactcaaacaaataaatagcaagaaaacaaataacccaattaaaaatgagcaaaagatctgagcaggcatttctcaagagaagacattcacatagccaacaggaatacgaaaacatgttcagcatcattaaacatcaggtaaatgtaaataaatccacagtgagatatcaactcaaacctgttagaatgacatcaagaaggcaaaagataacaagtgttcctgagaaggtagagaaaagggaacccttgcacaccgttggtgggaatgtgaattaatataaccattattgaaaacagtaggggctttctcaaaaaaattaaaactagaactaacatatgatccagcagtcccactactggctatataccgaaaggaaatgaaatcaacacgttgaagagatatctgcacacccaagtttattgcagcacattcacaattgctgagatatggaatcaacctaagggtccatcaactggtgaatgaataaaagaaaaaatgtggtatacgtacacaatagaatactgttcatccatgaagagaatgaaacctgccatttgcagcaacatgaatgaacctggaggatattaagttaaataagccaggcagagaaagaaaaaataccacgttatcttactttatgcggaatctgaaaaggttgattttaaagtagagaataaaatgttggttaccagaaggtgaggtagttaagagagagggaggattatgaagataacggttaaataatacatatttacagttagatatgagaaataaaatcaagagatctattgtacaatatggtgactatagttaatgatgatacggattgagtattccttatccaaaatgcttgggacctgaagtgtttcagatttgggattttatggaatgcttacatatacataataaggtatcttgggcatgggacccaagactaaacacaaattcacttatgttttcctgcactttatacacgtaactttgaggtaattttatacagtatttttagcagttttgtgcttgaaaaaaagtttgcattaaatacttatatgtccaattttccacgtatgacatcatttcagtgctcaaaaagtttcagattttggagcatttcagagtgtgtatttttggattagggatgctcaacctaatttttttcaaatgaaaaatactaagagagtggatgttaaatgataacatgtgagggaatgcatttgttaattagctagatttaaccatatcacaatgtatatgtacttcaaaccatcatgttgaacacaataaatacatacaattctctatgttcatttaaaaaataagcttgaaaacaagaattttacaagtttgattttgattctggatttttttaacttagatgcagacatattatctgatcagggcgaacagaatttagcaaatcattataaaatctttttgaaagtaataaaggaataagtaaaggtattgccctccttttttttccttaggaaatgtttagattggtccttagctttgtttcttgttacacctgtagaatatagctgttgcatacataactgtgtctaaataatctggggttcttgttaaattttagagtctgtttcagtaggtttggaatgtgcctgacattcgacatttttttttttttttttttttttttttggagacagagtcttgctctgtcacccaggctggagttcagtggtggctggagtgcagtggtgggatctcggctcactgcaacctccacctccggggttcaagtgattctcctgcctcagcccccagagtagctgggattacaggcgcccaccaccacacccagctaatttttgtatttttagtagagacggtgtttcaccatgttggccaggctggtctcgaactcctgacctcaagtgatctaaccccctcagcctcccaaagttctgggattacaagtgtgagccaccacacccggccagtattcaacatcttacttaacaagctcatatataacggcgatgctgttaattggtaagtagcaagggtgcatgcaggcaaagttttctcagtattgatggaagccctcacttaaacctagatagcatttaataatttgggttattggtgtcctatcctttacttagcagatttttaacatgtcatctggtaaccatggtaaagattatgatactaaaagcatatgttttagggtttaacgtcacaggactttaaaatctcggttatagctttggacaaaaaacttactaaatctcagttttcttatctgcaaaatgtgaataattctacttacacaatactgtgttaatggtttattcaatcacaaaaagcatctaaaatgccccacaattatcatgtgaatttagaaatactagattccttctacacatctacacacagacacacacattaacacacacacacatacacacacaaacaggggggagagagggtgctgtataaggaatccacaagatatgcaaaatgaatctggtatttctaaatatgcatgatatttgtggggcagtttagatgcttcttgtgttttaataaaccatcaacccagtattatgtaggtattatcacttgtgtgtgtgtgaatattcagacacatcttttttcaacatcttcaatgctggagcattgtgtgagctagaacccagctaagagagggaggtcttcaaagttgtaaaacatatgtgctcaagtgagtacaggcatcaaaatgaattcaagagtaccctttaaaatgctgcatgtcatatacctggttatggcttttgggaaaaattctaatttagatccctttccaagtggcacaccatagtgctttgcaaatgatagactcaagaaggaataaatgtattccggctgaaagttttgtcatgggacaattttatgttacataaatggaaattcatttggaagtgacagggaggttaattttaaatcaattcaaaagctatgaatcccttttggcaactattatgtttagtttaaaagaactctgtaggcttattatagataccatgttaagcttttgttgtgcacgtatatgggtgtgtagttcacattctcagtttttattactaaatttttcaatacaaaaattaattcattttaattgacaatcaagtacaagatatatcaaaatcgagcaatacatattttcattttgtatgaaatgtgatgtatatcgtgaaaaaattttaaatgagaacagtaaggttttctatatttttaatatatccgtgcccacttcacaaatagaaatgaaatgccataatcttcatgtatgagaaatattaagttcattcctatattcagttgctattgcccagtggtatgaaagtcctacctcaaaaaggtgtagccaaagaaagataactggcggggcactgtggctcgtgcctgtaatcccagcattttgggaagccaaggtgagtggatcacttgaggtcaggagttcaagtccagcctgaccaacatggtgaaactctgtctctactaaaaaaatacaaaattagccgggcgtggtggcacacgcctgtaatctcagctacttgggaggctgaggcagaagaatcgcttgaacctggaaggcacaggttgcagtgagccgagatcgcgccattgtactccagcctgggcaacaagagtgaaactccatttcaaaaaaaaaagagagaaagaaaaagaaagagggagggagggagggaaggaagggaggaagggagggaaggagggaggaaggggagggagggagggaggaaaccaatggcgtgcgttttatattatttggaaaccttatatttgactcctctaaaattcagaaatggttttatattgtacaaccgtttccctcaaatatttggtaatggggctgacatagtctatccttacttcaaagtagtctgggtttttgctcgctggatgcatgaacatgttgagatatttaatcactacttcttgtgtcacacttccctctgtcacagttggatggggaatgagctgataaaatatacataattaatagataaggtacattgaataatattacaaatacatgtaactggaagaacaataacactaccacccggtccttccccactagcctcaccatttgggagtttttgctaggagagaaaagtggttaatcctcactagcttctcacctcagagattacagatcattctgccctggtgtttgataaggcctccaaaataaagcaaaaagcttctgccagctttttgtgtaggcaaagtgtagtcatctttgtggtaggtggttctgtaaaggacctgctatttacgcctctgttccccaccacaccccacacccaggaaacaacttgaaagaggaaggagagtccggacgcggtggctcacacctgtaatcccagaagtttgggaggccaagttgggtgggtcacttgagatcaggagttcaagaccagcctggccaacatggtgaaaccccatctgtactaaaaatacaacaattagctgggtgtggtggtgcatgcctgtaatcccagctacttgagaggctgaggcaggagaatcactagaacctggaaggctgaggttgcagtgagccgagatcgcgccattgcactccagcctaggtgacaagagggaaactttgtcaaaaaaaaagaaaaaaaaaaaggaaggagaagccaaatattggcactcgttttgcttaatactataacggacaggcgcagtggctcacacctgtaatcccagcactttgggaggccgaggcgggcggatcacgaggtcatgagatcgagaccatcctggctaacaaggtgaaaccccatctctactaaaaatacaaaaaaattagccgggcgtggtggcaggtgcctgtggtcccagctactcaggaggcagaggcaggagaatggcatgaacccgggaggcggagcttgcagtgagccgagatcgcgccactgcactccagcctggacgactgagccagattccgtctcataaaaaaaaaaaaaaataataataataataataatataagttggccagcttggcaagttttgcaaactttggaaaatgtttctcttcctcactatgaattagattaggctgtccttgctaattaatggggacccatgggagatggcgctaatctgggaggagcagattatattctaagggtacaggctcttggatcaggctatctgggattaaatctaccattgactagctgtgtgaccttgagcaaccttgaggttgctaggtgtgtatcacctctgagactcgattgtgacatctataaaatgttgataaaataagtccctaaatgattaaactgttgtgaaaactatattgctgtatgtcattgaatctaagaaataataaattgcaagatagaccattgttgtgtgtaggactaacaaattaaaaaacaggatacccctaaacgctatacactaatgattttaagacatattgattttagaaatgttaaaatgtgaaatgtcatctcagaatcaattaaatacagtagttaattctgatgagttgcttagatcaatacttggcatatagtaaatgatcaatgtttcctattatggggtggaatttccctgaaggaaggcagtcatttctagcttgaaaatggaggccttttagaaaggaagcccatagccttcaataggaaagagtaagaataggaactggtgcgtgctcacaaaaaacgttgtgtaggggttaattttttcctgcttttctgctacacaacacaagaccaagccattgttagtatagagtttggcctttctccatcccttaacgtaattctcttagttacccccaatcccaaccctccagtaaaggccagtattcctacagaactctctgatggagttgtggggactataagggtgagtagtaacaggaggagagcctgttccatgtttggtgtggggctgaagcccatgctgaggggcagcagcacactaggaagagccattgtccagtaaatggacaattgtccagtaaatccatgtggtgacaagcttagcgaacagtggcctgggcgaaagaatcactgagagtggccaggagggatctaaacccagagaagtgattacccaatagacttctgacttaggagtaaatgtgagaagcaaaatctcttttcccagaattttacaaaaaatcgactcttggaatggcagcggtggctaatacttaggtcacgtagatgataaaattataagacaatatacataatctagactgctgttcattgaatcatgtcagtgtgtttgccacatttcttctaaaagaacatttttcatattttatcatttctgcaatcagtagtagtaataataatatctaacacatacaacttagtatgttctgggtggtattctaagtgcattgtcgatattaagtcatttgtaactcagtgagttagcaacagttgttatccctcatttaacaattggggaaactgaggtgtgaaaaattttcttctccaaggtgtcacacattcacaaatacacacagacacacacacacatagacgcacacacaaacacacacacacacccatctattaagtggtagaggttggcagcatgatcctaaccgttgcatgctcatactattttacaagaccatatgatctaaaatctattggtagcttagaatttatgtaccgctaaatatgtacatctattgtgtactcacaaaaattaaaaataaaaaaataatttaggatatctgttatggtggttaaattgtgcctgcagtgcaattccaatctaccttcctgcgtcctgggaactctgaggaccggtatagagcaatgacaggaagcaagggctctggcttcatatctgcattggaatccaagctctgacacaagctaagcaagcttgagaaactttttaaaagttaaacattttattttcaaagagttgtagagttaagaacagttgtaaaaaataatataaaagatcctatgtgaaatatcctgtgtggcttttgctcggttatccccaattgtaatatcttgcaaattatattcaaacattataatgaggattttgttacaattaacctctctaattcagattttcccagttttacctatactcatgtgtgtgtatatatttagttaaatgcaatttttacacatgtagattagtgcgtccaccacgacagtcaaaatacggatgttacatgaccacaaagatctctcctgttgacctttaataaaatcatcaagcttcctcttgtcaccctgtcccatgcctaacatgtggcaaccattaatctgttcttcatgtctataattttgtcatttcaagaatattatgcaaatagaattgtatggtatttaatcctttcgaactagcttttttcagccagcataattgcttaatgatccatctaaattgttgcatattgcaatagtttgttactttttattactaatatatgttgctgatttatttatggttgtggacatcctacagtttcaccattcactgactgagagatattgttgtttacagtgtggggctgttactaataaaattgctgtgaaccctaatgtacaggatttgtgtgaacataagtcttcatttctctgggataaatgcccaggagtgcactttttggactataatggtagtctcatatgtcgtattgatgttgtcgtttatttttaaatttctttttcattgacaattaatatttgtttgtatttataggttacaatatggtgctttgatatatgcttacaatgcagagtgattaaatcaggttaatgaatctgttacctcatattttttttgtggtgaaaatattaaaatccactatttcagcaattttgaaatatatgatgcattatgatatattatagtcaccatcatgtacaatagatcactaaagcttcttcctcctacctaactaaaaattcgtaccctttgatcaacatctttcttttcccggtaggacccttccgccatttctgtggtaatcttcattctaatctgtatttctatgagttcaacttttttagattctgtccatcatcagatgaataaataattaaaatgcagcctccacctgctgggtttaagcgattctcatgcctcagtctcttgagtagctgggactgcaggcgcccgccaccatgctcggctaattttttgtatttttagtagagaaggggtttcaacatgttgaccatgctggtctcaaactcctgacctcaagtgatctgcccctctcggcctcccaaagtgctaggattacaggtgtgagactccgcacctggctcctttagcttttaagaagagaaagaattgaaattatgattacaaccaagtgaagttgaacttgaactcctaattagaggatggttctgatgttaatttacgtaaaggaattgtgatttttgtttttctgctcccactccaatccgttttttcccacacagaatattcccaactcttccttcttgaacctttgtaacattactggcattcgtttctcttatccataagctctaatcatccaatgtttcttcttgctgttattatattgaacaaatatttattagatcaatcaggaataggaagaatagataattttgttttactttcattttttccttctctaatgtacttcctttctttatgtagatctaagtttctgacttacatcattttctttttctctgaagtccttcttttgacatttcttgcaaggcagatctactggcagcaaattccctcagcgtgtttgtctgataaagtattcatttctcttttacttttgaaggataatttcaccaatacagcattttaggttggtggatttattttttctctctaaattttaaatatttcagtacactcttttcttgctggcttggcccaatccattttatgctcttttttgttctgctctgtcactgtgaagctgacccctataaattgcatttccttagctcccttgccgagtagtctcctgttggttttggccaatggaaggcataaacataagacagaaaggcagaaagagagcagatctgggacattccttttacattgacctccactctctttgtgccttatttcccaccatggcagcttatatctctaactatcctgttaagaatctcctctatggctctatctcttactggatttagaaaatcctacttccttcacttgactcttcaggcatggtaaggctgggaaaggtatatcacaattgcctactggaggttgtctctaggtgcctcgatagccccttttggtttctttaagcccattcacacctctgaaagtagttcctttgtactgttttattgaaccatccatgttgaattctatttcttgccagggacatggctgataaagggagataagaaaaatcagtaacttctccctttgaagtaacaaagtataagatgaaagtaaatgaaactcatagttactttaagaaaatgcgtttgtgtatatataaacaatttctacttttcatgactctatctggtggtttttagtataaaatactcactagaacgtgagattaaagtttgccactccatactgatttgcatatggactgttcgctcaagaagtaagggttgaagaaattggaacgacttatcatttaaatcaggaatcatatgacaattcaactggtgacaatgtgccctactttctaagagcccaagttgtacatatgattgcttgtgtatgtatgtgtaagtcactccacgcacatatgcacgtcacccttgagttctgagtttacaaaactaaactaaattcagttactaaaaatatcaaatttgtgtaattttcatgtatttctatgcaagcacatcattactgaaaggccctattatactgttgcaaaatactcatgaagtaccaaggtgcctgattccaactgttatttatttttttttttttttggctattatgttcctaacatagcacataaactagctcattttctcatggtacttaactaaggatacttttttaaaatctagagtattacagggtctttgcatacctacctcttaaactgatttgttttggattctggaaaacttagcacgttggttaagtggctgtgaagaaattttgatgtatacgtccacctcacatagacctaatagctatgtgtttggctagtattttgtggaaacaaataattaagagcaagaaaagttggatttccttaagaacactgaatcgcatagagattgggtaattactggagacaaaaaggcctgtcaataaaggtcagatatatgcaactccctccttttgctgaaaatctattattccatgttgaattagatattaaaagaatattatactttccaataattatattgttataatgcaggggatatatttctcaccaatgactctacatccacaatgtatgatgaaataaaatatatatttatttttaaaaatgcctttagggttttaagatacttaagaattcatttcttgttcacttttaaatttagtgctcttagttctaagagtttgtcatctgttttatgatacaggttaatactgcaatataagcaaggaccagtcttcattttacaacatgtatcataaaactgtaggctaaagaaaagtaattaaaaaacactctgatgcatgactttaatgtaattaaaatatattttgcattcatgaaaaattacaggtctctatcaatccctctataaacaattataatcttattacttaaaattatttcaacatcatacacatatggtgtatatttagctatagtcgtttaggtttttaaaatctgctttcttttctaaatcataattttagaccttttgctatgttcgcaatctttgtgtaatcacatgcatagcagacaatagcacattgtaagtatattagaaatatgaaaacacagtctaatctcaatgcaaaacactgttgaaaaacacagcatgataaaaaattaacttataaatggagagatatactctgctaatggattggaatactcaacatggtaaagatgtcaattatctccaaattaatctatagttttaatgccatttctactaaaataccagcaaggtctttttagtagacttggatcagcttattctaaatttatacggaaaagtacaagcctgataatagctaatacaatcttgacaaagaagaataaagtggaaagaatcactccactaaatattaaggcttattatgtagctacagtaatcaagacagtgtggaattgggggagagatagacgcatagttcaatgcaatagaatagagattccagaaatagacccgcacaaatatgtgcaaactcattttttaaaaagttgtgaaagcaattccaaggaggaattttaacagcctttccatttctatagccttttcaacaaatagtgtgcgttttttctaagtgagtggtgtttgagcaagtagacatctaaaggcaaaacaaacaaagcccacccataaatatataagtaaataaatagagcctcaacttaagtcttatgcaaaattatctcaaatgtcaaatataaaacataaaactacaaatattttagaaaaacatatgggagaaaattttgtgactgaggcaaagactttttacactttacacaaatagcacaatccataaaaaagaaaaactgataaattggacttcgttaaaattaaaacttttgatctgaaaaggatcctcttaagaagtgaaatacaaggtacagaatgggagaaaatatttgcatatcagttgcaaaaacagggactatatacgaagaacttagaaaactcaaaagcaaaaatccaaaaataaattaattaggaaatgagccaaaggcacgaagagacattttactgaatagtatatataaatgacaaacatatggaaaagatattaaatatcactagacatcaagcaaatataaattgaaaccacagtgagataaaactacacatttttcagagtgtctgaaataaaaaatagtgacactaccaccaaataactagcaaaaatgtggagaaatgggatcactcgtacattactgaaaagaatatcagtctggaaaatagtttggcagtttgttaaaaataaacaaacactgtgtatgtttaccactccagcctgggcaacagagtgagaccctgtctcaaaaaaaaaaaaagctgaagaaaaatttttttaaatggggaatataggtggaagtgagagcctgatagcctaatatactttatcttttctaatgtatttaactgctgctcttatcattgcttctatttaaaaatgtattatatttttgctaaccaaccttctaggagccaattgtactctcagatttccccgttttcatactgaggttttatcgaagtagcccttctccaagtccctcccctttttattttaaatatagagattttaaactatttctaatcttactctcttctccaagttcctgaaggtattacctcagaatatgaaaacccttaaatgtacctcatttgctaacgtggagagagagacatgtaccttggaagataatttgtgatggaaaaagcatatgcctacacacacacacacacacacacacacacacacacttaaacttgggttcaataacatattaaacttgggttcaataacatcatacttctcaatattccaaataaagttaactctaaagattcaccataagattttcaatattttaaaaatgtttaaggaaatataaatgctttaggttgtttaggttgtttagacatctattaaacccagaatatactttaagcactaatctttaatatactatagattaaaagctatctttcaaataaccagacttcacaatgtttaaacattttataaaactgaacagaattttgagacataaaccaatataaaactttttttatcctcctctaaattcaatccatttgtgaaacctcatttaaattcgaatcaaatattttctctgatttccattaacaggctctgactctcaggcttcagtgagtaagtatattcattgtggggctcagaaaattttgaaccaaattataaatggtgtttatttgtgttttctttccatttctttttaaggcattctgtagtgaggtattcaaaacaggatgccactcaaagactctctctctctctctctctctctttaaaaactattagagaaaatagcatgtgcagcttcatctgctacataaatcctctcaaagcttctctcctttccagatgatttgagttgtcaggaagcaaatgaagcttaagcttttgggcccctttatttcatagaagtcttcaaaaatatgtgcagaactttcatataatcacgtgctcgaaaaatatgcacaactaagaatagcctcgagctttaggcaccgcaatcgttggatcttctgttcttatcaattcttaccaattgtttcttaggatgacacattaaaccttcagaaaaaccttatcaggatgaaaacttagccttgccatggaaaaaaatggtggttttaagaacagagtaaaaaaataattctaacagggaggggatttttttcttttgcttttttaaagaaagaaattaggaaaggattttaatttgagcctacaagtttgctgaagttgcactctaaaatgtcatccacatagatttatattgttttctttactctttcttgtgtagtaataacttggtctaggctttcaataaataaacttatgaaacagttttgagtattaacaataacacaatggcactgagagcctgtttttacaagactctaaatattttatttaaacgatacccagaattctgatttgcatatttaaaattttcctgaattagataattcttttaagtgtgttacgttatataatctagttgcagtatccttttaacaaaaaaaagcaagtgcaacagtgttaaacatgacattgatgccacctaatctccatcaggcttcacaatgtagttttatcttatatttatttgtatgcacgaatgtcagtgtcgtatggcaggagtctgtaaactttggctcataggctaaacccagcccactgtcttttaaaaaaaaaagatagatagataactgtaaattcacatgcagttgtaagaaataatacagaaagatcctgtgtgccattttacccagtccctccttaaggtaaagtcacagaactatagaacaatattacaacaagatattgacatcagcacagataaaatacaggatatttccatcaccacaaggatcactcatgttgccctttcatggtcagacccacttttttcctgccctcaggcactccttaatctctagcaactactaatatgatctctatttgtataattttatcatctcaaaagtgttatgtaaatgaaaccctgtattatgtagctatttaggactagccttgttcactcagcataattctctggagattcttccagatttgtaatgtgcatcaacaatgtgttcctttgtactgctgagtagtattccatggtatgaatatgccagtttgattaaccatttgcctgttgaaggacatctgggttgtttccagtttctgcctattacaaatacagctgctatgaagactcatgtacagtttttttatgagcaaattttcatttatctgggattaatgccatggaatgaaatttctgggctgtaggttagttgtatgtttagttttttacaatgcaccaaacttttacagagtacctttaccatctcatgtttccaccaacaatgtgtaagtgatctcatttctctgcattcttgccagtgtttgatgttgtcactattttttaacttagccattctaatatgcacagagttatatcgtattgaggttttaattcgaatttccctaagagccaatgatgctgaacatcttttcacaagcttatccgccatctatgtgttgtctttggtgaaatgtctccatgtcttttgcccatttttctaatggatttttttgtgtctattttgtttttacttttgggttacatgaattcttcatttagtctagatactagtgcatggtcagatatatggtttgcaggtatttttctcgatgtgcagcctgtctcttcatcctcttggcagcatctttctcagagcaaaattttaaaattttgtatgtcaaatttatcaaattgtgtcttttaaggcacacgattttaacgtcaaatctaagaactcctcctagcctttcatcctgaagactctcctgtatgtttttgtaaaatatttattattttgtgtttcacatttaaattcatcatctatttgcattttattttgcataaggtgtaaagttatgtcaaggttctttttcttcttttttctttccattatttttgtccacttgttctaagacccatgtgttgaaaagactatctttgctccactgaattattttgcactgtgtcaaaatcagttgagcaatttgtgtgggtctatttctgaagtctctattctgttccattaatctgcgtgtctatcccaacaccaacaccacactatcttgattactgtagctatttaataagtcttcagtctggtagacttattcctcttacttcattcttccttttcaacattgttttagctattctaaatccattgccttttcacataaattttagagtgccttttcacataaatttttcctacacctaaattccaaaaatattgctgagattttgataaaaattgtgtaaactgtgtaacagtttgggtaaaattgacattactgtgttgaatctctcaatccacgagcacaatatatttcttcattaatttagatgttctatgatttacttctaaaacttttttttgctttcaccatgtaagtacatggcttgttagatttatatttaatttttgtgacatagtaaaatatactatattttaaatttccatgtccatatgttcattattaattcacagaatgcaagtgattgttaatagactttatttttggagaacctttaggttcacagcaaaattgaaagacagagatttcccatctacccattgtgcccgcacgagcatggcctctgtcattattaataactctcaccagagtggtacattcgttacaataaatgaacctacgtcaacacatcattataactcagatccataggttccattagagtttactcttgttgttgtgttttctgtgtgtttggacaaatttatagtgatgtgtatctactatgataatatcatacagagtagtttcactgacctaaaatatttgtgctctgcctagtcatgcctccctgccaactaacccctggcaaccactgatatttttactatcttcataattttacctttcctggatgtcatatagttggaatcctacagtatatagaagcattttcagattggcttccttcagttagaaacaggcatttaagtttccttagtgtattttcatgtcttgatagctcatttctttttagcatctatagtctgaatgtaccagtttatttatccattcacctactgaagaacatcttgttgtttccaagttcaggcaattatgaataaagctgctataaacatccatctgcaggtttttgtgcggacataagttttcagcttatttgggtaaataccaaagagtctaattacttgatcatatagcaagagtatgtttagttttgtaaaaaatccttaaactgattttcagtggttgtacaagtttacattctcacaagcaatgaacaagagttcctattactccatatcctcaccagcattgggtggtgtcactgttctgagtgttgaccattctaagaggtatgtagtagcatcacattgttgttttaatttgcaatttcctgatgacatatgatgtgaagcgtcttttcatacgcctgttttccatctgtatatcttctttggtgagttatctgttaaggtgttttgcccatttttaaaatagagttgtttgttttcttattgttgatttttaacagttctttgtatattttggataacagtccattacctgatatgtcttttgcaaatattctctcctattctgtggcttgtctttacattcttttgacaatgtcttttgcagcatagaatttttcaatattaatgaagtcctgcttatcaattatttcttgcataggtcatgtctttggtgttatatctaaaaagtcatcaccagacccatatagattttctcctatgttatcttctgtgggctttatagttttgcattttacatttaagtttctgatccattttgagttaatgtttgtgaaaggtgtttgcatgtggatgcccagttgttccagcaccatttattgaaaaggttgtctttgctccgttatcaaacatcagtcagttgactatatttatgtgggtttattcctgggctctctattctgttccattgatctcttcttttgccaataagacactgtcttgattaccgaagtcttgaagtagagcagtctcaatcttctgactttgtgcttgtccttcaatattgtttttgtttgtttgtttgtttgtttgagatggagtctccctctctctgtcacccaggctggagtgcaatggcatgatctcggctcactgcaatctccgcctcctgggttcaagcgattctttcatttcagcctctcaagtagctgggattacaggcgtgtgccaccactcccagctaatttttgttgtttttagtacagacggggcttcatgatgttggccaggctggtctcatactcctgacctcaagtgatctgcccaccttggcctcccaaagtgctgggattacaggtgtgagccaccacgcccagcccttcaatgttgttttggctattcaaggtttcttgcctttccatatcatttttagaatctctttgttaatatctgcaaagtaactactgagattttgattgggattacattgagtctatagatcaatttgagaataactgacataataaaaatattgagccttcccatccatgaatatggattatcttctatgatttctttcatcagagggttgcagttttcctcatatagatatggtatgtattttgctagttttagatctaagaatttcatttgtgggaggtgctaatgtaaatggttacaatcaatttttgtatatttatcttgcatcctgctaccttgatgaattcacttatcaataatttctaggagattatttatagatagcttgaaaattttattttcatgccatctacatataagggacaattttatgtcttcctttcccatctgtatggattgatttaattgtcttgcctcattgcactggctagaacttgtagcagtacgtgaataagagtggtgagcgtgtgcattcacgccttgttcacaatattaaggggaaagcatttaatacttcactattaagtatgaagttagctgtaggtttatgtagatgttgtttattaagttgaggaaattctcctttagtcctatttttcagacaggttgtttcaagattagatatatcagtttgtcaaatgcttttagtacatttactgataacatcgtgtgatttttcctctatgacctgttaatatggtagattgtagtgactaattttcaaatatcaagccagatttacatcctggaaataaaccccaagtgatccattagtacattgctgaattttatgtgctgaaattgtattaataaattttccattaatatttgtaaggaatatggatttatagttttcttcttttgtactgtttttctggtttgggtatcaggctattgctggactcaacacatatactcagaattgttttcttcccttccatgttctggaaaagaatgtgtagaattggtgttaattcttcacaagattggcatacttttccaatgcagttatagaagtttgcttttgtagaagtttttaaattatgagttatatttccttaacagttatactcattatctagtatatccaaattactattaaatagccaaagtctaggccattcaaattatccattttatattcattgatttacagtagtttgtgccttttgaagaatcaatctatttcatctaaattattaaatacttatgtgaagaattgttcatagtaaacccttactgtctttttttttctttgtattttccaggcctgtagtaatattccctacttcatttctgatacgggtaacttgtgtcctctcaattttttctttgtcacttttagcacattgtcaattttattgaccgttttgaaaaaatagctctttgttaatgaatcttctttactgtttttctgtttttattttgattagtttttactctttattattttcttcttgagatgagaactttgattattgatctgagacttttcatcttgtctagtgtatgcgtttgggagcagctttttaaaacgcaatgcttaatttaacctaaatgacaatattttatagtaggcagtgcatacggtgttatctttaaaacctggtcttgctattaggtacctctctgagacgaaagtcttcaagcttattgaagtttatcaattagcaggtcgattaaaatgtcaacttttcttttaatatacccaaggtataatctatttgagggcagggacctgaagttgttagctcatatctttaatgcagaaaatctggccctaataaatgtttcataaataaatacacatttattccacggcccagttccattgttttaaatgagaatttgtcactatggtcatcccatagtaccaaggttcataatttcttttagcatacactctcaaagagatttggtttgctactctcaaacattcaaagtttattttaaattttatgatgatctggatcataaatttctttatttccctctcttgcctgtttccttttttccaactgatatcactaaactcctattacacccaatgtgcttttgagagctaaagttatcaacataatataaatagcaattaattcttaatatcaagaagtttacagctgagtagtaaagatgcattcatattgttagacccatctatgagtgggagtgaggagaagctaaaaaaaataatcttcataaagtaaatttaaacaaagcccagaagaatgagggagcatataatacacaaaggatataatacaaagaaattgcaagtggagacaattttattcacacaacaaaatgacaagcaatagtgataaagcaactaaaaaggaagacacaactgttttgatggagcttgccttccatcaggtaagaaacaccttaaacatacacccaatttatttatcacacatgcaaaaagggagtaaagctgcatgctcagaaaacatgtatgatgaattttttaaataatctgagatataatagtaggaaagcacataacataactcaaggaagttcagagatgtagggttgaaaatgaaggcaaaggctacattgcgtaggatctattcatccttgatcatattttctacaaggtatcacactagtactgagtatccatccaagactgaaatggtaggggtgagcctgcttgctaaaaattcttcagttgtattagtggcagtggctccactcctcgctaccacacccattttgcaattctctgccctgttttttgccctggaaagcttgtctcttcatttgtatcaccaacgcctcttgtgcactaacttttaggaaattatgtgacaccagctggacatcagagggcaagggaaaaaaaggtttggatatttgtgttccacttcacatatgcctcactaaggtcctggtagtgactgcccttttctattgctattccaacattattcctttaccttgacatattaggcctggaggtagaaacaaattacctctcttgctgcttgctaggtgactcaccatcccttatttgttctcatcagcctgcctatatgtttgtccatagttctttcaccgaattattatctgttaaatgcttttgaatctgctacctatatttcctaccaggatcttcactaataccccataagagatacaactattaaaacatgttactgattctcagctcactagcatcaatgcatttactatctttgtactcataatacctttcttacattcagaaatctttaaaaatcttcattaatccctgtacatttacctcataaaacagttgggaatcaatccacaaagtgaggagtcattattttcacaacacaggcaaattagttttgagttttgcttatatttggtaagcaaatgttttctttcttgactctatagatagtactgatatgtagtaccaagtcctgaaatcacatcgttatgtgaatgccatgggcttcattgtctatggaaatgtgagttaaagctctttttttttttttgtccagtggaaaaaaaaatctgaacatttaaaaatgaactcacaaggttccagatatctacttactaattttaaagggaattaagatggtgtcaagtaaaatttatttacagaacacacacacacacacacacacacacacacacacacacacacacacacaataatctctaaagtatcaaccatagatggagtggggaaccaggaccttcactcccacctggcaataaggcagcacacttctacctctatcttccaccagaacagtcagaaggggacgagctaaaatagatttaaataagatccagagtctgataatgtaatatcccaaatgccaaaaaagaaaatctcaactggaatgcaaaaagatagtagtcacttatactgacatgacaaagatgacagaattatctagcaaggatattaaagtagccatcccgaaaattgttgagtaagctttttaaaacattttgcaacaaataaaaaatgggaaaagtcagaaagaaatagaagacatagaacgacatgacattttagaactaaaaatatcgtaatcaaaaaaaagttcaataaatggtctcaacagtagaatggaggtgaggagacaggggaaatctgtgtgcagaaagataggacaatagaaattacacagtcgtaacaagaaggaaaaaaacgatttttaaaatgaaaatattctcagttgtcctatgggattataataaaagatctacggtttatgccatcagagtttcaaaaagggagggtgttgttgaacaagtactcaagcacataatgattgaaaaataccaaattttgtaaaatgcaaaaccctacagattcaaggagctgagtatacaggataaacccaaagaaactcatgcttagacgcatcatagtcaaatgtctgaaaactagttatattttttttttaaaaaaagtcttaaaaacagtgaaagagaaaaagacactttatctataggcaaaaaagttcaaatggcagaggatttcttatgtgaaaccatgaaagcccgaaggaagaagtatgacatttttcaagtgatgaaaggagagaactgtcaacttccagaaaatagaagaggaggcaacacttccaaatgtactttatgaggaagaagtattttgataataaaaccaggtaagcacagtagaagagtcaacaaattacagaccaataaaactcatggatatagagacaaaaagccttaacaaatttttacacattatattaagaagctaaagaagaataatcacttgatcatatcaattgatggaggggaaaaaacgtttgacaaaattcagtgccccatttatgataaaagctctcagaaaactaacaatggaggagaacgtcctcaacttggaaaagaataactacagaaatcttatagctaacattgtaataataatgaaagaatttacacctttcttcctaatattaggattaaggcaaagacggttgctttcagccctactattattcatagtactggaagttctagctagtgtaaaaatgcaagaaaagtggataaaagcgtacaaatcaggaaggaaaagttatactgtctccatttgcagatgttatgatgatctatgtaaaatcccaggtattctacaaagttactcttagaaatgatgagtttgttaaggtcttaggatacaagatcaacttataaaagtcaattgctaatcaatgaatatgaagtttcatttatataagatgaataagttctagagatctgctgtacaacatcgtatctatatgtaacaatacagcattataatttaagaatctgttcgttgggtagatctcatattaaatcttatcacagtaaaatgattattaaaaattaattgtatttttgtatacaagcaattaactactgaaacccaaaatttttcacatagtatcttgcagtcactctgaaacaatgaaatacttatgaatctaataaaacatttaccagatctatatactacaaactaaaaagctaaggaaataatgcaaagacttaaataaacggagatatatactgtattaatggaattggaggatacaacatagtaaatatatcaattcttccaaaactaatctatagtttgaatgcaattcctatcaaaacatcagtgaaacatttttgtctatttggacaccctccaaattgcttgaattctatttgtcttattttttctggtcctagtgcctataaactcactcacaaactagcatattttcccattggacttaactaaagagattttttaaacacctaagaaatatatgccttataatatgggtaacatttcaaccaatatggatcactgtggaaaaaggaagtagaaatgatccataatgattttttccctaatcaataaatttgtgaattttatataagtatattacctaataagcctgtttctcttcaacttatttgtcctgtgaagctgcattaatcataatgcttggaattatattaaataatcaaacaagttgggaaaatgaccctgcacttccaaagtaatataaaataatgcctttagggtttccaattatttaagaattaactccttgttcactttacgtttaccatattcagttctttctaattaatatgccatctatttaataacacaaggatgactggttaatattggaatataatcatgggccagtcttcattttacaacatgtatcatctaagtgtagacaaaaaaaagtaatttaaaaaaatgtgtatgagttcactgtaataaaaattatgctttatatttttgaaaaatgtatgtctaattaattcatctgtaaacaattgtaatttcattaaaattttaacaaaataatttcaactttcattttgaatcgggggtacatgttcaggagtttgttacaagggcatattgtgtgatgtggaggtttggggtactgatgatccagtcacccaggtagtgagcattgtacccagtaggtagtttttcagctcacacccgcttccctccattccccctctagtagtccccagtatctcttgttcccatctttatgtccactgtgtactcagtgttttgctcccatttataagtgagaacatgcggtatttggttttctgttcctgtgttaatttgcataggataatggcctccagctgcattcatcttgctgcaaagtacatgatttcattctttttcatgaccatgcagctaaccaaggaggtgaaagaactatacaaggagaactacaaaacactgctgaaagaaatcagagacaacacaaataaatgcaaaacatttcatgctcttggattggaagaataaatattgttaaaatggccatactgcccaaagcaatttacagattcagtgctaatcttatcaaactaccaacgtcaattttcatttttcattttcattagaaaagactaatccaaatttgtatggaaccaaaagagcccatagagccaaagcaatcttaagctaaaagaataaagcaagaggcatcacactacctgacttcaagctatactataagcctacagtaacccaaacagcatggtactggtacaaaaacagaccatagaccaatggaacagaatagtgaacccagaaacaaagcgacacacctataaccatctgatctttgactaagtcaacaaaaataagcaatggggaaaggacttcctattcaatagatggtgctgggaaaactggctggccacatgcagaagattgaaattggacctctacttttcattatatacaaaaatcaactgacggtgaactaaaggtttaaatataagacctcatactgtaaaaaatcctagaagaaaacctaggaagtacccttttttacattggtcttggcaaagaatttatgactaagtccccaaaagccattgcaacaaaaacaaaaattgacaagtggaacttgactaagccaaagagcttctgcaaagcaaaagaaacatcaacaaagtaaacagacgaagaatgggagaaaatattcacaaaatatgcatctgacaaaggcctagtatccagaatctataagaaacttaaatcaacaaaccaaatacaaatacattcattaaaaatgggcaaagtatatgaacagacacttttttttttttttttgagatagggtcttgctcttagtccaggctgaagtgcagtggcacagtctcggctcactgcaaacttcacctcccctgctcaagcgattctccagcctcagcctcctgagtggctgtgatgacaggcgcctgacatcacggctgtattttttttagagatggggtttcaccatgtcgccctggctggtcttgaactcctgagctcaaagcgatctgcctgcctcaacttctcaaagtaatagaattacaggcatgagctaacacacccggcctgaacagacacttcttgaaagaagacatacaagcggccaacaagcatataacattttttaacaacgtaaacatttttaaatgtgcttctttttacaaactggccgagtgtggtggctcatgcctataatcccagctcctggggaggctgaggcaggaggattacttgaggccagaagttaaagaccagcctgcgcaacataacaagaccctgtctctaaaaaaaatattaaattagctgaatatggtggcattcacctgtagacccagctactcagaagattgaggcaggaggatcacttgagcccaggagtttgagactataacgaggtatgattgtgtcgctacactccagcctggatgacagagcaagcctccatctcttaaatgaaaatttcttaaaaagcaaaaacaaacaggaaaagaacgggttttggaaactctgctgttttcctttttttgtgcaatcacatgcataaccgacagtagtgccattatattagaaatattaatatatctaatcacaacacaaagcactgtgtaaaaaagccgagtatgatgaaataaattaaagataacctaaatattggacatatgtactatgttaatgaattggaggaatcaatgcggtaaaaacatcaattcttccaaaatgtattcataattttaatgcaattcctatcaaaattctacctgaaagatattctgtagatagatctgtagatctatttgtagataaacttattctaaaatttatatggtaaattataaccacactctgggacatgaatctagaggaatgaaaaatgaaaaactacatgattgttttgcagctttatttgtagtgaccaaaccctggaaacaacgaaaatatcccacagtatgtgaataaagtaactatagaacatccatgccatgaactactactcagcaataaaaggaaataagctattgatgacaacttaaatggatctcaagtacagaatgccaaaaaaaaaaaaaaagccaatctcaaaaggttacataccgaatcattgcatttatctaatattcttaaaatgacaaaattacagtgatggagaacaaattgattggtaccaggctttagggatatttagggagggtgactgttgtgactgtaaaggggtagcatgaggcaaatctctgtggtgatgaaacaggtgtttatttgtggaggttgaggttacacaaatcagtgatgaaatagaaatatgtatacatatcaatgtcagtttcctggttttgatactgaattgtagttattgtaggatactgaattgtagttattgtagttaatctttgggagaaactgggtgaagggtacatgggatctctgtatactatccccgcaaattcctgtgaatctataagtatttgaaaataacaagttaaaataaatttttaaaaattctgtgacagttattaaaaatggaaatttgagcaagttcctttattatggggctaataagacctacaagatgtagttattctgaggactaaaggagaaagataagtgattaagggacacaagaaagtactgtggtgacacagtctgaactggagttcaatttgttcggtctaaattttattttacgtgcctttcacttttccagttattgtaagcatatatttgcacctggattataaaatcttaagggaagtatatgcattccacacaatgcagaaatcattataggtgccaaataaattctgattatcaactaaggctgaatggcaattaaatgtatctcagggcattcagatctatcaggatttggtgctttagacattacccaggacacatctttgttacatttagaaccacggttgtttttagaaacatacactttagggtttctcaaagttgaccatgcattagaatcaccggtaaaacacagagtgctgtgtcccaaccccagaatttctgacttttgaggtctcgtgtcaacttgcatttctcagaagttcccacgtgatattgatgttggtttgggaccgacaagttgtattcacgccttggcctaaacaagggtttatgtttgtagaaaactcacagtgcaagatacaaagggcacttatactctgggcaatattgtacctcacagcatagagggacactgatgctaacatgcagacttagagccaaatcagccccaaaacaattttttcattttttctatgttgttttatgaaaattttgcttatatgcatatttagacaaccacactgagaggaaaggaggtgacctagggaaaagaatgttttaaattaaaattaggccttatgttttatctcatacaccttttgctggggaaaatagcaatgttatgacaataatattctaaaacacaaaatgtacaattaactattaaggtaaacatcacagtctgactcaatatttttttaatttttatctattactcattgcagtcgcaagcagttgaatgtttgacatagaaaaatgagtctgtcactttaacaaatggtacaataaaaacactcaaacaaaaattttagtagggattattataactataaaaagaatatctttctttaaaaaatgtttccaatgttttctatcaattttgggctcgcctgttgcataaaagtaataaggaacaagatgaagaagctttctattggcaaagaatgatttacatgctgaatgacataatacaactgtattcacttaatacagaaaacaagcctctattcagaaccattaaatgatcattaactcaatgtctaaaaaaatggtgttttaagaattggcaccagagaaatggaagaaagaataatttgttagtaaagaagttttagcataattcacaactgaaatttaggatttgagaaaaatttctttcctgcattataagagtattctttattttagcaggaaaacatgtcccatgagacctatacacacacacattctgccttcagaattcagctgctgcattctgctgctgcttctcttattcagactgttggcatcatcaatacataacttttgattgaatcccaaggggaaaaaataactttggtagacagtggatacataacaaatgcatggattattctgggcattcctttttatttggtagagtgaaatttttggtgttgttgagaggataaaaaaggcatttaaaagtcaattttgaatccggattttctgctctgttaataaattcacatgaaagttacagaaagtattgttatgcttttgtactgaatagtttttgtgtttagaaggctttaaaagcaagtactatgtccactgtgctattctggtttggatattaatcagaacacagttgagcattgtttgaattcacagagcttgccatgctggaagcacaaccttatatgtagtgaccatggacagtcctattatgggaaaccaacttgagagagaaggcgggtcacttgcttgtgcgcaggtcctggaatttgaaatatccgggggcctctacagaatcctggcatcagttactgtgttgactcactcagtgttgggatcactcactttccccctacaggactcagatctgggaggcaattaccttcggagaaaaacgaataggaaaaactgaagtgttactttttttaaagctgctgaagtttgttggtttctcattgtttttaagcctactggagcaataaagtttgaagaacttttaccaggttttttttatcgctgccttgatatacacttttcaaaatgctttggtgggaagaagtagaggactgttgtaagtacaaagtaactaaaaatatattttactgtggcataacgtttagtttgtgacaagctcactaattaggtagattgattttaaattatcacagtagtttgcaaagaagcataaatgttatatatactgcatatatatatgtatttattcaggaatatatatttttcattgggaaaacttttcaacagaaatggagtgtaaaagtttttctttgcgatagaactaaacacatgatttcttgattaacaaaccactgcagtaatagaatatgcagaatgtcatttgactataacagatttattttgattgctgtgagatagtttgtatatctgagttattattttgattagttgatacttccgtatttagtaacagttacataaaggttactgacctgacatatattctcaattgaactaactactgtataggaactacatggaggcctaaaagttagaaaaagtttctctgacacatcatggataaaataaagaataaaatgagttgggacggataattgaaggatgtgaaaagtattgataaagatttaattttaatgtttcttactcacatttactatttcaaatgctcttttctgtagcatatcatgataattatttcaaataatgatgtgatctatgctatcaaatgatcagatgatttcttgggtaaacgacatacaaacttgaggaactcctaattatatttagtagtaaagtcaccttgttgtttcatgtctattatgagccagcttttcagttcaattttttagtttgtctttcatatagaaatacaactatttcgtttatttttaagaaagtcatgatgactaatgaaggatttaaaaatggactgtggcacaacagtaaaaataatatatgataaggactgtgtgtcccgaagagatgggagtttatctcttccccacccatctttgacttgtggagtgtagttattctaaaatagatatgagggcaatgcctataattaagaatgaaaaaataaatctctccaaataagtaatgctccacaactactaaaaaaaaaggcagaagttttgccactgggaaaactttgtggaaataagttaacattgtccatgtattgagtcacattaaaagctaccagactttataatacaatatttacttacattgttggcttgcttcataaatttcttttggtggacatcattattacttttagattgaaaaactattatatttactatcattacaaatatatgcatggcatatatctgttgtttgcaatatacacacacatttttattttttgtttttatttctttgatatatgtaacataaataccatcaaaatcactagtgattttatatatatatatattctacataattaacatcatatacaagtatatagagcaattttgaaagaatatatgcaattctgctgaaattaagcaaggtaaatctacactctgctttgtcatagatattcaaataactttcaattcttagaatgcgaagaaaggtaatctttttgggacatgccctgtaggattttttcacgctgcatttaaaaaatcatcaagtaatgcctatgcaacatgacaatgagtttggtaagaaaaaacggagatatactcagggctatattatacattaaattttgctgtttgacaacatactgctacttggatgtttgacatttgaatccagtttgtaaatttgccgtagtttgataaacttacaaaagtacgttttgttgttttttaaccaaaacagttaccctttaaaagagatcactgtattgtcaaacatattgtattgttcacttttagaattactcaaataatgcattgtaaagaattattcaaatagtgtactgcaaatagacatttcatttgaatatatttaaatgatgtaagtcatctgaggtctaataaaatcaccttttagaatttcatctgcagaatcttttaaagacatcttaactacgaaaaagagattgctgatctaaattgatgatatactgttaatacaaagcttttggtgtatcttacatgacataacattatgaaaaatacaatagagtatgtcatatagatgttactctaaactttaaaaaaagactacaaagtgttctatgcataattacattatttaaggggaaaaaggtgttggctgacactattccagctagacagtactgaattgcaaattcatcatttgggcacagatattaatacagcttcctctttattcctatagcattcatttgaaatccctgtactccatgtcatttgctacatatgaaacaaattgtcaagtttttaaccacttgtgtagtttaataaaagagattaaaatcattgtcttggaaacatcaggtgtttttcaaaattctattttattatctttcatcaaaattttatctcaagagtaaaacaaagtcatttcccaaactttccttctccttccaccttctattgtaatattttcctaacttattaaaaatgatttatcatactttttcatcaactctttatttcatcacacatacaagaaacacagtattttggtatgagtatatatatttatatatatgcacatttatatgcattcaaatcacagggtataaagtttcctaagagggtctaattagaaattaacctttctttaaagataattttctgttcatttttctaaattttctattttaaacacacatcattttttaaggaattgacaaatgagactaatgtacattccctgtctgacaacacagaacgaaccaggaagaaaggatttatggggcctgaggttatacaattgggggtgctattttaagaaaaataatagaaaattggatacagccttgggaggggcccctcatgtaagtaaggctttaatagtttcttgggaaatcacctctgtatgaagagatgtgttgacatttaatcttttcccagttacattttaaaataaaattgatgctagttatatttctttagagcatttattatttctcaaagacaaccttttatttaatgcagattagagagttaaaagaatttataatggtaggaatttgacatttctgcctttcattctgaaaagatacattgattaaagtgatgtcaaactcagttaatggaggcggtgcagttatttgaaatatacagggtatataatttgaaggcacgccaaatcacaatgacaaggaataatgatgaccttggtttatttttatacagtacattcaggttttgattggattcagagagaggcaatggttttctttctcacaaagtcctgctatagtcctaggaggtttgtgttctgttatcaaggcagttggttcgtattggaatattttctggggaaggtcatgggctgcagtgtgggaaataaacgtttttattaaatgcaaccaggtttcatgaaaatatttccccttgtagagtgtgctcaatgcagtatactgatcttcaaaaaacaaacaaaccaagcaaataaatagtttgtagtcttcaccttttccctacgtaaaacatctattagttagacttccttggggtttcatgctataaaatattgacatatgtttggagttctgaagtttcattttaatacagatatcaaagttaaaatggcaacaccatgggataatttattattttaccaagtttggagggttttttctatttatgtcacttatagaattgtccctaaaatccttgcaaaatttcaagctccctctacttaatactaaaagtgaatgtgtcttccagagattctgataaccccttcgaatgggagagtaactctgctatttgtgaatcactcctatactaaatatagttccaagattaaaagctaaaatgattttgtttattttttcatgaaattttttcatgaaaggcttgatagtataaaaagtctgtttccctcatatattacagcatattatagcattcaatgtgccttcttaaaccagatggctcctctagagattatgaaatactttaacacccagggcatagcctttctgtttccccattcaagattacttccttgaatatggcccaacaaaaagaccaaaaaaatacatttggctccagcgttttaagggcatataaattttcttaagcacaattctgataggcagcagacaaatgagaatgaggaagggaaatggctctgctgtcttatgcttaaaagtgtcctcatatagagagaaacaacacaccctggggcctttcggagggtagagggttggaggaggaagaggatcaggaaaagcaactaatgggtactaggcttgatacctgggtgatgaaataatctgtacagcaaacccctatggcacaagtttacctatgtaacaaacctgcacttgtagccctgaacttaaaagttaaaaaaaaataaaataaaaagagtcctcatctcacggccatacaacctctacctcattcccattaaaaacacaaagatcagtactccctcttttatagctcacatcttctgtttaggctgccattttaagggataatttctattcaactctgagctcgatctttattttaatctgatatcactcgttcaaaatacttgggaatttcagtaggcaacggaacacacagagcaattttctggaggcctacaacctctgaaggtgactttgcgtagtatatgtaatgatagtaagccctgagaaaaccaatgttcttagtagtctggatttggtttagaaatcaatgtattcctgctttcttttgtgatcttttgccttctccctcaatgcctcactttcactctgtcattatgaaccccattcctcactaatgggaactgggggagaatggacaatgatcctttaattgaaatggagttgtcatttccttgccatgctgataaaatgttgttgctgttgttgtttgttgttgttcttaaatgactctttcagaatttttaactcagtattttgattacataccattttaagaaaataattgtccataaattaaaaatgctagcaaattgatgaattgattttctcatgccaatttggaaatctgaaatatatctaagactggtgaataatatgtaggtctaattgccatttgaataaaagaatctgaggaagagctttgcctttatttttgtttattattcattttagtttagttatttattttagtagaaaaatgtggttgtgtcaacgaagaggaggtacattaaaatgcattattaaagccaatgcttatccatgtaatgaaatgagaatgtagatggcttaatgggttttggagaggattaagataattttaaagaaacttcaaaaaatcagatgctcgaatcatgatgttttttgtttatatttaataaatatgaaaaccatacatgggcatatcaacaatgaggaattcacatatatatcacgaagtctcttgctaatttgtcaacttttaaatgtgttgtcttcactatcatgaaaattttgatttttaaaaaaggtcagtgttagctgagcacaattaccattacggtgtcccatattatttccaattatgggcaaataaaatgcttaccctttaaatgtttttaccctcttcttggcttttgttttgttttgttttaaagcgttctcccttcttccactctgcttttggctaagactgtcatggaatcaggactataaaagggcataaacatcagtagcttttttctcattcctggcactcatctttatttgcactcaacttgtctcttcctttatcagattacggttgcaatagtaccttagcctgagctaagtgctgacttaaagggcaagggagtcagtacactgttacaagtgcagattttagccttggaagctgtgtgaggaaaaattaaagaaataagaaagaaaaatcacaaaatcagaatggcccacgtattttcatcaaaggcaaattgagtaattcctttttatgttggtgcttaagaacgatgtattagaaataaattggtgactaagtgaacaaaatattaataaactagttgagtaagtgaaaaaataataatctgtaaaaatgatgaatcccaatgactcacatgttgcaaaataactaggaagcaaaagggaaattagactttaaagagcgtaatcagatgcaagaaatgttggcttgtaggtggttaactaaaatcgcttacgggaagctcagacagctggggaatcctgatttagtagacgctgaagggcagggcatgagccatgtgaacagctgctgaagagctagaggattcctttggattaggtgtacacaccccgtctctaatgggctgtcagagagcaccaagtgttatcacagaggttcactttgctcaagcctatggcttttgcagtgttttactttaaatgtctgaaaatggattggctctcaaaataaatccaaaaataaaagtatcaaaataagtgactctctaaaacttgtattgtgtggttttgggtgaccacagtttaaagaagggacttacagctgatgatttgttatccatttattgattcatttgtccatgtaacaaatacacatattgagtgcccattttgtgccaggtactgtgctatgctctggcgatagtattctaaacaagtgaactcaaagagagactagcatttcaaggaggatgtgcatattaaatacacacacacgcaaactacttgcattggagataagggctatagaataaagcacacattgtaataagaatgtataatagggagagttagaccagtcttcgaaattggggaaatacttctgagaaaaaaaaaatattcaaagcaaggcaaagaagaatgaggttagagtatagttgtccaaaagaaaagagggagcaaaaatgtccctgtcagagggagcaatgtttctgaatgtggaaaatggtatggagaaagatctaaaacaagtacagctttcctagagtacagtgagggcagaaaagtgtggaacaagcttgcatctgaatggccgactggggtccaatcattcagagccttgaaggttatagaaattatttttctctttatactaagatcaatggacagccttatgggtttcaggtagaaaactgatgtaaacatatttgtattttttaagactatcactctgttttgtgtgaaagagattggcaagtgcctagggtagatgaaggactatcaatctgaagcaattacggtagctcatccaaaagaaggtgatttggactagaatggggacagtggagatgaaagaagtaaatctattcaagatttgtatatgagatagaatcaataggaattggtgttgtattgcatgctgtgtgctccatgaaatgcacacctgggtggataatggtgccatttgcaaggagattggaagggaaattggaacaacaggaaggattaggggtgtggatgctaaggtgtttgttttgttttgtatttttatgtagcgcgtgggtattgtgcctagaaatgaagtcattattagggatttaaatatgcaactcatggagtggatgagaccagctagaaagataatagagtgtgaagaggagatcggaaattcaataaagaagacaaaagcactaaaaaaaaaaaatcagagaagacacatctagaaaaaatgatgaaattctaaggaaaataatatttccataaagaggtctgttcctttcgatctccaatttaatgacttcatgaatgaggatcccacttttagcattaggtgtcttggtttccacagtctctaccatctatttacccctaatttcctcccatattgctatttctgtgaatattaccaaaatgttgccttagtagaaaagcttcaataaatatttaaattgtataacgtattcagctttttcctgtactctgcacttcctaaaaataccttcttcggaaaccccatttcaactgactactgtataatgaaatgagccttcagtgtaaaacatttatcatagtctcaatttcaattgctcagtcagaattgttgagtaatatgaaaaatcatcctttagagaatacagaattgcatagttatgacaaggtaagtttgcactttatttaatgctagtttagttaatatagatgcttattggagaaatgtctaaaaattctggaggaccgttagtgaaagtgattatcccaatatctgcaaaaatggtaaaaatacctagaaaacattgacatttcagtttaaataaagccagaatcacaataaagagatagaaggcatttgagtaattcaatctaatcatggatgaatgtaatgtacttatcagttagctttggaggaagtaagactcgatagaatagtaatatgatattgagcaactttttttaacattaggtttttaattgcttataactcaacattgttgaacacctatgttctctttgctttttatgagacagcaactctaagtcagagaacagatacacacacatatgtatatgcgtacaactactataaaatatcaagaaagttataaagcatggtacaaatcaatcataaatgattacttatgaatagtgtgattatggacattctcattgaagaatccatttttataaataggcataagagtatggacatacagagatgtgaattagagaatgattgcaagaagcagtgaggcaaaaaggattaatgaaacattgatctgtcttacatacacagctattgacagtaccttgtgtgtgcatagcactattctagattcacctaatcttcaatgataatactgtatttaccatttaacaagcctgtaataagtgtcaggcacttctctgattacatcacatacatatgtgataagttccatattaactctagaaggtggggaaacataatcatctaaatttaccagatgaatatgtagaggtacagggagattaagtaatttgcttaaggtagctcagctggtacgtggtagagtcaggattttaatggtggcagcatgacagtaggattaaagattcttaaccagtcagttgtcacgatctctcagattttaatagaattctaaaaaggatagaacaaaatataaaatggcaggaatcatagtatcttctaacaagaactagacatgtcccattgaggatgctctttaaaaataaaacccattaaaattttgggttgtttactcaaagcctatagacattggcatattatattttcttagataaaaactgagatatcctaaataactcatgcccattctctagacttgcatagggagctgtctatgataatatccataacagttatcttgtttcacaattttattactatctcactcttcttactttgtgaagatgaaaaagatcaaaaataaaactaatgcagccctggtttgtttgtaatcatctacagttagccatccttagagtggtctcactagttgttcttttagagtttatttcagttatgtacaggcaactgtgctacatgaacaaaaagctaagaactgggctaacctgaacatgatttagtattgtaaaaaaatggtttacatagattaacgtgccatactattctgaatagtacttggcataaacagtaggttatttaagttactataattactgttgcctttttacataaactaatttttctcttatcttcattatgttagtcatccacagtgtgatatttagttgcatacattcatatagtgtacactgtacaattctagagtgtaccagtaacgtggactattaatattatgctatgaggtaaatgacacccctggagttaagcaatgtgcactctgtacgataacgtcaacattggcattctcatatatatgattagaaataatactgagtttctctgacttcacaagcaattttattctctcatctcataaagaggtaatgaatgcacacatatctacatatttaaaaataatgtcagagatcgtgatggaacagaattattcaagatgtataaatgagggtgggaggcaaagggaagtcagaaatactccccaataatttatttcaaattaaaagcctattggttattggctggtcgcggtggctcatgcctgtaatcccaacactttgggaggccaaggcgggcagatcacctgaggtcaggaattccagaccagcctggccaacatggtgaaaccacatctctactaaaatacaaaaattagccagacgtggtggcgtgcacctgtaatcccagctactcaggaggctgtggcaggagaatcacttgagcccgggaggtggaagttgcagtgagcggagatctcgccactgtactccagcctgggtgaaagagtgagactctgtctcaaaaaaaaaaaaaaaaaaaaaaaagtctattgattatcatgtgcgtttccatggtatcaattgtttagtattgtccagtaactaactagtatataaaactatcaggataatataaattttaacatttatttaaaatgcatcttcttaactgtaaggttattgatctttggataagctatagaaataagccttaattcagaaatatatttcggagacccagtaggttaatttgtagcactactctttaatattaaatatacaaatatacattgtttttataacttactgctataatgacactaagatgtgtgattatataaaaataagaaattgttagaatttattttattttaatcaatgctgatccatttttctagtgtatgagattagatgaggttgtatgagataccacttttctaggaaaaaagaaagtctttatgacagtgtgatgaatgaagtaaattagctcatttctttcaatattactagtgtgcatagatcttctctttttgtctttctgtctatcatacatacacagaggcacacatacatacacattacttggaaattaagtggtttacgtatgaaagtttttggctttactgataagatcagtaacatgataaataatacaacactgaatacatttttccatttgaaaagtgtaaagaacactacaacacggttgggaaaaaaaaacaacttattatattcaaatgtcattcccaattgtaacaaacatataattatttatttcttaattaagaagctattaataatagtactttaatattcaacattagcagtaactttgttggtttcttttttgataatttgtttaagaaaattagattataaattctgttatggtaaaaatacaaaaataaagcaaagtattatcttctttctatctcttatatgcatcagttggacaagatattgagattctcttttcttttaattgcatgctttcattatttttctattcaagcttcaccctgctaagttcaagtgaagtagaggacttcatgtctctagaaccaattaatgaaatttcttcgtctttcttgaacttgcagaaggtcaatagtgaccattttctcccttcttaaaaatgttgtcgtctttaagatctgtgcactgtcctctcatggcttcactactactttggagggtgtttgtattcagtctgcattgcaggctgatcctctcttctcagcctttaaaaattaggtttccttgggatctagtcctagcataattctcttctcataatgatctcttcctcgatcattgcacttatgtccacagctttattaacacttatatacagataactaaccaagttatacctctagcttagatttctccaatgaattccagaactgtgatttcaactgcctgggtggcatctccattcttatgtgatagtcacctccctctaaatgccctaaacagaactttctcttcaccgcacaaaacctgcttccttctcattgtttttcttatcattgaatggtgcaaccattcacccagtttcacaagccagaaacatatctcatccttgaaactctgatcttttttacccagttatttctaagtcattgccagtcactgtgggttttatcctctaatatattttcatccacttctctttatctcctctaccatcatcctagcgcaatatattttctctcactaggaatacagcagcctttcctttccagtttctctgcattctctttcgtattcttgataatccactctctaaacttcatgcagccaattaaattcgaagataccaccacttgttaaatcatgttagtagtttctcttggttgctaggaaagccaaacaaaacaaaacaaaacacatttaaaaatcaaagtctagacactgcctacctctcctatctcatttcccatcatgtttcctttgcctcgcccccttactggctttctttttgttccctgactaggtatagctttttttttttatctacagtacttttgtgtatgcttttctatttgtctagaacctccccgtttccccttttttaccttgatgacaccattttccacctacaagcttacctctggatagacatcaaaatcccctaagtacatcaaattcctctaccacgtaacatctgttcataacacatagcactgttatgattccatatgtatgtacgtgactaattaatacttgccagtcggattatgtggtaagttctatgaaccaagacacctcaactgttcttgctcaccactttattacctggaaccaaacacattaggtttccccatatatatttttaaataagttacttgatgtgtaatgctttaatgaacataattacagatgtttacatataatatgttataataatgatattttgattgcattttatgaaaattttatatgacaaagcactttcattttggttaaagcttcatatataaatatataataaagatttgctttttgtcattgggtgctgttcccttttttgatttcccatactgcttttcacttgtggttcttgattttgttttttactgtttttaacccatgtcctttttctttccttaatctatctttgtaaagtctcaaagaactagtatctagaatatataaatatcactcaaaactgagcactaaaaccacaaataatctagtggaaaaaaatgtgggaaaagccttaatagacatttcactgaagaggatatacagatggtaaagaaatgcataaaaagatgttcagcttcactagccattaaagaaatgcaaattaacactacaatgagttatcactatacacctatcagaatggctaaaattaaaaaaagaaaaacagtgacaacactgaaagctaacagggatgcaaaggaactgggtctttctaatattgctgatgggaatgtaaaatggtacaaccattctagaaaacagtttaggagtttcttctaaaattaaacatgcagtcaccatacagcccagcaattgtactcttgatatttatcccagaaaattgatgtttatgttcacccaaaaaccttgacatgaatgcagtagctagaaacaagaaacagctcaagtatccatcaatgagtgactgttaaacaaactgttatatactcataccactaaatactacacaacaatttaaaggaatgaactactgatactcaatattcacaactccaatggatgtcaagagcaccatattgagcaaaaaaaagtcaaaggttaaatactgtgttatttcttgtatataacattactgaaatataattatagatattaagaacagatattgatattaagaacagatattggttgccagaggtcaggaataaggcagagggtatgctatataatggtgccacaatggagccttgtggtgatggacctgctcaatattttgattgtggtgtttgttacacaaagctacacttgataatgtcgaatagagcttcacacacaaacacacacacacacacaccagagtcacacaagtgcatacttgtctatctggtaaagcccgaataagctctatgaattatagcaataatttcccagtttttatattgtactatagttatacatggtatcaacattgggagaggtaaagtgaagtttgcacaagacattgttgcatatttctttgcgacttcctgtgagtctataatgattgcaaaataaaaatttgaaaaatacagcattagacctttaataagctcttggttttctgaaggctagggtatcatcaccaaacctaatcgaggataagtcttgtaaattaataagtctatcactcaaggtacaaaggatggtttaatgctaatctgctagaatgcaatccatttctattatatgggaacgtgcatcactgattgaataaaatatcatgatgatggaggccgtattctatatgtcctactttgtaaggtgttgtgtttcaggttgtttatgaccaaaaaccctatatgacaagcgctagaagttatgctggtccacgggcatggtaacttgacaatgcctgagactacctgggttttaaacttgcctctacctacaaaggcaagtaatcctggacaagccaatatttatttaactagtattaattgagagcctaccatatttctggcactgagctgagcatgtctactactgtcctcaagaggaaattaggaaaaataatgccccttcacaagcttacttattgttggctttaaaagggggatatataaagtttcttggtgagggtcaaagtgttgagaataatttttctttgtattattttaactattattgttaatcacaaataactaatgtatataactctaaaagataaatgtacatttggataccaacttgtataaacagatacatagatcaaaagactacctctgattttatgtttgtgcgtgtgtgaatgatctccttgctttcaatctggtcttcagaaaatcccaccttgtaattgctgcccccgttgagtttctaaaacaaataagattgtgtgcctccagcttaacgtcctttagagaatcttctagcttcagggtaaaatccaaggtcctaacgtacaaggtctttcacagtatggcatctgctcatgtctctcacctcctgatctgctgttccccaccaggaacacttctgtctagatataaaattactttggttcagcaaataaaataactttggttcatgtaattttgtgtctatgacttgttcccacttcttggaatgttctcccaaaaaccactatcaccatgtctcttccaccaatgactattaatattatttttatctttccttatagaatattgtttaaaagaattccttactaccctaggtcagaaaatggggccccaatatgtattcttattgtaaactcactatggataattctagacaagcaattatatcccctattttagctgtcagtttgcttctcggcttctgactcactctcttgctccttgaggagatagcctgtgcttattatatgtggattaattgtgcctaacagcttgtaggtacacaaatgaatgactacacagcatttatctgactattgtttagccattacatcactgtatacatatttgaaactcaggcatcattcagattggaaaagccttatgaatactggcatgcattattttgtacacacacacacacacacacacacacacacacacaaaatagaacaggatgggataatcctaagtagatacttttttgtccagtgtactcaatatattgtaaaaattataaatcttagactaaaatgttggttgcttaatttggatgattcatataatctgtcgtgtttttggttatctgtgtactttgttttctctttctttcttagtctcaaaggaaatgtccaagttaaaaaagagccccaatttgtggggattcctttgaggagttacaaagctgagatatcttaggagatgccaaattgatgcaaagtggtggagaggtgagcagagtagaaatttggagaatcacttctgctcctatagtgcatgcatgccagggctgctgtcctttgaggtgggcacaggagctctaagtccagtgggtgtctgaggacagattactgagaaagtgaatggttggcttggactacctcaaagacaagtgtttgctcctgcttgagctattgttggaggtttcctgaaggagacttagaacggaatgtccattccagagagtattcagtttcagtttgctgcattcctaagcttattttccaccctgggagctggccacaatgattggaaatctttcatctgttttaatctgggattgagctcatttataaaaggaaacttagtgtctggataaatatgtgtgcacaagcatggagccccatacaagtatgcccaaattcaaggtgagaaatgtttattgcatgactcaaatacatggaattgaatggactctgaaaacaaaaataggatctacagagccagtctaacaacctattcatatttattatttttgcacttaaatgtttgtaatattttattgaccagtgaatatgaactatattttgtatattacgttaacatattattcatgtaataatgaatttttaaaaactggtgtcttgaaccctttcaatttccaaagtattacagaaatccacagatctggtatgcacaggcattttatgagaaaacttagcttgagtgatatcattaatttactgaagtagtaggccctctgacctgcttttataataaaattaagtttctgtaaactaataagaccatagtaactttttctttaatattttatctttgaggagatttgttaaagaggcttgtatgtgacatgacaatctattttgacttataaaatttcaaccaaagaaaagatgcgatatagtatctttgttcttatctatgacaatttttatgatgatagttccataattaaattttttcttaatgaaagtgtatattattgtattatcttcaactaaattagatcatataacccaattttgatctccgtatgccaaaagcagagaattgaccagccagaaaaccatccaggccttatataatatattgtgcctagatgaaagcttataagcattcttctgcctggggctcacattgtagaaatgtggtgtgcaattttgaaagttgaaaatatagactctgattgagaaatggaaaagagtagagttctaattcatgacatctagaaatcaagttctaccactgaaaaattaatttgcatatattcattatcttttatagtgaatgataatgataataaagacaataaagataatatacatataattggttttataaaaactatggcaaaaaatatattaccattctcacttgtcagatgaggtaactgagtctatattatttgaaatataactttaaaaattatattatctccgctactagattatatactcctggatgccgcaaaccacatcttctatgtgtttatattctcatagagttttgaatatttccttgtactaggaagaagttttataaatgtgttttgaattaattaatatccaaaagtgatggaaagaattataagttacttataaatttcttttgtttcaaaccattagatgatgacacttaattttttgggtataatatgatatggaaagactctcagataacttcaaaaactagaattatgcatacatacactcagatttctaaaaataacatgctatcaattcatcctgcctgccaggtatacaattcatttgagttttgcatgcgcgtttcaattgttcacattaaactgtattcatagatacaaattcacttttggaatcttgggtacttaaacaaaaacatagcctttctaatagaagtataaaaaggatactaattgatgaatataccaagtatctttccaattgcaggaaaccattaaaattgtgtctatacactgtatctcttttatcaaagactgtaacaaaatcaattgctatacatattgaaatatttatgtatctggtatgattacattagcttcagagtggttccaaatttaaattcccattggagaaaaatggagtgagaaatttgtacataagagagaagaaatgttttcttttttttgagacagagtctcgctctgttgcccaggctggaatgcagttgtgtgatctcggctcactgcaaccttcacctcctgagttcaagcgattctcctgtctcagcctcctgagtaactgggattacaggcgggtcccaccatgcccgcctaatttttatatttttagtagagacggggttttgccatgttggccaggctggtcttgaacttctgacctcaggtgatctgcccacctcagcctcccaaagtgctgggtttataggtgtgagccaccacacccagccgagagaagaaattttacagttagaatttatttggacacattttagaaatttttttcctgtaaaactcaagtttcatagtgtgtacgtgaatgcatctgtgtgagtgaacacctgtgtatttgtgtgctataaaaagatgaacacaggaatctaatagcataagtcgcaaggtaagagtattgtccaactaaaatagctaacttcagaggtatgaattactttttgttggtgggtatgattttaacattcccttgaatttattattgtaatatttgccactaaaagaaaaaaatcatggcttagaaataaatttaaagtaaccaagatcattgctatataaaccagaatttaaattgagggtttttgaaccattagggtatatttcccctctggcttaaatttgaaaactgatgaaattttagatctcagcacatttaatatgtctaaacaatactcatttgactgcaaaacctgtatatgtaatttccaaggcccagaagttcagtatttgaaattaaattgttgcatattactgagaaatattatcttaaagcatctgctccttctgctgttctaagttaggtgtgtatttctcgttagtgctcagtcgatgagtacaaataggcatgcagcatgagagcagagcattcatttcattgactgcaattactaacatgatttttgacatcttattcattgggagagtgtcttttaatgttaatttgaatgaatgggaatactttcacattcttaatgaatctgctcatagagtaaaataaaacatgactgttatgctttgaagatcaagaatcttcttttacacaaaagggtaaaaaaggccaaagaaggtgaagtgacactcttcatgctagttccaacacgagtattttgatgaacaagaaaaaaagccttctttagatgtaggtgaactgggtgatttggcattccttcctctgaattcccagggtattttgcctgtttttctttaactgcatgcaattcttgtcctttatccactgtttacaggtctgtttctcacaataggcggtgagtttatttacacagtgactgctgttacatatcacatgtactaagtctctagtgattgttgcttaacgatgactgaattgataggtcctagcatggctgatctctcacattattcttgtttggtttgggtttgggtatgaatggtggaaagagaaatggctggctctgagcaacatattacaatgggtttctagcatctactcctcacctagtactagcttagacagtgagcaaaataaaaccataaagcaggccaggcatggtggctcatgcaagtaatcccaacactttgggaggccaaggcgggaagatcacttgaggccaggagttcgagaccagcctggccaacatggtgtaaccccgtctctactaaaaagacaaacattagctggacgtggtggtgcacacgtgtaatcccagctgcttgggaggctgaggcagaagaatccgttgaacccaggaggcagaggttgcagtgagccaagttcgtgccactgcactccagcctaggtgacagagcgagactctatctcaaaaaaaacgaaaaaaaagtaaaagtaaaaaagctaagaaagcaaactatgtgttgtcaagaagtgtttatttttgcatcttgaatttttaaaggaggaggttcagatctatttgttagatgacacagggtttgtgaaaactcttgcagaccaatgaaatcagaacatacaggcacaccaagtgcagattgtgtttagagccactgttctaaaagcaggtgtaagagggttgcagttatatcccagataagagccttagggcattaggaatgaaaaagacaaaatgcaaacaaaagatatttagatatttaattagtaaaacttatttgcgcgggtaatgaggagagagacaaaaatagtagagagcaaatcatcaatactgacttcctgatttcttactagggcagtataggtgtacactatatatatatatataatattatatattatatatatatatataatattatatattatatatatatataatattatatattatatatatatataatattatatatataatattatatattatataatatataatattatatattatatatatatatataatattatatattatatattagtactacttccttttataaattggacagaaagcttatatgtatagaaagaaagatcaggctgggcgcggtggctcacgcctgtaatcccagcactttgggaggccgaggcgggtggatcatgaggtcaggagatcgagaccatcctggctaacaaggtgaaaccccgtctctactaaaaatacaaaaaattagccgggcgcggtggcgggcgcctgtggtcccagctactcgggaggctgaggcaggagaatggcgtgaacccgggaagcggagcttgcagtgagccgagattgcgccactgcagtccgcagtccggcctgggcgacagagcgagactccgtctcaaaaaaaaaaaaaaaaaaaaaaagaaagaaagatcaatattttttcaaatgtccagccaattgtttaagtaagttaaggtatgtaatctaaacttataatttaagtttaaagaaaaacattagaccaaatatttagccattttgatgtagccaagtttatgcttcaggagagttgcatagttatgaattgagctcacagaaatacaaatacacacgtcatcatagtgtgatatccagcatagatggggggcagttatcataaatcctgtcctaggctgggtttggaatgtgagacagattttataataataatatttcatctacataaaacagtccatttcctggactataaggatcatgataccatttgtttatcatggctacaaacagaacaggaagtagtatccttcaacagagaagataaattataacagtcattatttagaatatttgcaattcctttgtgtagggctattctttgttagctgaaataaagctctctgccttgattacagttatcattttgtgaaaatattgaatgagtttagattcctaaaggaaattagaagttgagtaaaatgtacattcacttagaaatttccttgcagtgaaagatgctgattactataaatgaagacagggaaatttcattcatttaaagagattactacaggtgacaagtttaaaattagccttaacttaaaagttggaaaatattttttcctgctagagactaatgccaactccgtgatgtatgtaaggtcatgttatcaggacccagcttattgctgctacctcctctcctacccttctcctcatctcttactcctaaccctttagccaaaggctcctatgtgcgggcccccaaactaccatgctttcgtgttgtcagggataagtcttcctgaaattaccctccttctccttaccaatcacttaattaattaaagcctggtttccacttcatctcaggaaaaattatttcctaacccctctcaccaatctccattgactccgccaatggaggttaggtatggttttaaagtgttctcatagcataagttcatcaaaatgcacaatatctttcaccatattttgtcaatttatttactttaatatgagaatacaaatatcttggcatgtttatcagtgttacacggatactgttattttatcatcatgtttcccacctctcccccatacctagagatgagcataaggcttaatatataaagttatttggttaatgctttttttgaataaacaaatacatatctaagggcatgtgagcaacagagttcattgtaacactatgcttacagttaatcatctttttgttattgttctagcagcaagaaggatatatatctatatatatatacaaaggggagaatgagaatgatctgaattcaaatataaaacattacaaatgaataaggaatgtattattttgctagcattgccataacaaaataccacagtagactgggtttcttaaacagaaatttattttctccacagtagtaaaggctaggtataatcagggctgatttcttctgaagcctccctccttagtttgcagaggctgccctctccatctgtcttctcatggtctttcctctgttcctgtctgtgttctaatctcatctttttataaggatactaatcagattggattagagctcaccttagtgacctcatttaaccttaaatacctctttaaagaccctatctccaactacagtcacattctgagacaatgggggttaggacttcaacagacgaatttgggaaaggggcaatttagcccataacaaggagccctgtcaaataaaacagctttgagagcaaacaaaaattggcatctgagtgaaatatgtgggaagaggaaaataacttggggctttgctgttctcttcccactcttcctgtgacccgactggttccctgggaaatggtctttggatccccactgctgcttaagagtctgttttttttcccctgagttactgaggactgctgtcagtatgattgtagtgcaaattgatcctttgtgggaagtacaatagcaactggtaaccacaaagtaccagagggcaaaagaactgtagacgggtaaataaaaggtgtccgaaaagagcaaagggctggaagaatgggaaaatggagaaagtaagatatgcattgagaagactgatgattttttaaaatagtagatgttagatagatgatgagagagacagagagagagagagagagagagatggttaaaggaaaactggtatttggtctgcagttttgctgtttcaccagcttaacaccctacagtgaataacaaggtcatagatcatcacaactgcagaaaacctggagaatattttccatttcctcattatatagatgtggaaagtgagactccagttctcagaaacagttagatacaaaactaagacccagctagttctcagccagtgattttcatatcataccacacgctatacagttgtaggtttagaaaaaatctatggtataagaggaccatgtagtaccttacaatgcttctgtaatacccacagcatcataaagagtaataaatttaattattgcaacttaatgattcaacaattgtatatgtatatacgtaattatacatatatatgtgtatgtataaaatctaccaatacatatgtaatgcacatgtataaaatctaccaattttctatatatgcagaaaacaacaacaacaaacagtattagagaaaaccagggaattaagtcaaaatcatcactcccagacctgaaataaatttcaaaagctcttcgttactggtcctttatttgtccttcctacctcattttttgccccactcatataccacacattgcaactatgctaaactaccttattttttttagaaaaggacatcctcctcatacctacatttgtacatttcctttttatttgcttttttcctctcctgttgccacagtaaattcctaagttttctctttaaggatctgtggcctgctttggatacagttgagtgtagtgatattgtgccttgcacatatctctagaacaaaagttattctgttatagaaattacttatttactatcacttaagatcatttattaccatttactatcatactctaattcacagaaggcaaaaaataaacccttgaatggcaagaaatgtttaggcaatgttgggcaaattgtttatgaatagtgattgcaattaacatagagcttcatacttactggattaaatattgatacttttgagtcatatctctactcttagcaataatattggtgaatattctgtgctgtaagcaatgtaaatcataaaaacattctaatgtgtatatgggtattgaatattcaatgatattaaatcaatgttcaattcatatagatgattcttttggaaattaagaaatggatcccattttaatgagttttccccaacataaactatactttgttaagttcaacttgacaatttacaacgctcacatagctttcagatgtatacttaagatatatggaaatgaaaagcaaaatgttgtgaacaggaggtgacaagatattttaaatttaatcatcatatcttttataattaaccttttaaaacatttaattggcattattgttagaaaactttagctctggaagctaaatctttagaattgttgacttgtagacaagtcaaatatccaaaataaaatttcacccatcattagcagtagatgtatctagggtgaaattacacgctggattacttcaatattcttatatttacatttttatttttttcaaagtttctccagtgagcattttattgtgaaaatattaattatattttaaacttatttttagtttaagatgagaagatagtctttggggtagataaatacttttaaatctttcatttagaagttcctggactaatattatccaggtcccacttccttaaaaaaacctaatgtaacctttcccatataagcattgactgctatttcttgtttcacaacatttatgtggtatgtctatgcctatggtattgaatatatatttgaactctgctggcctattcccatctctcacagatcccaagacaatagagatcatgtcttacccatctttgtatctcttacagaaaatagatctcaaattctacagaagatattgaattgagagtttgagatgttagaataagaaaaggcagtgaaaggagagcctacatgtagcctaggccagatttacaaaagcagtagctcagaatgagatagggattcaacaaggagaaccaaattatttggtagtaagttgttgctaaattgtgggagatgaggaaaagggaataatgatagcagactccctgatattaatcccccaagagtgctctatggcacagtaattattcattatgggccccctctgtttggccccacgcccccaaaaaagacttctttagtcataaaactgaggggaatactacatactaaatccccttagagtttctcaatgtaatgcatatgcaaagatgctctggaatcctgcaggaaagacagctgtttaacttttaacctagtttcccaaactcatttcaccatggaacttctttaacatgcagtcaataaatgcccatttatctaatgtttaatgaagcatatgttggaattcttaaaattgttaatagctaatcaccgtgaggaactggtgagatgatggtaacattaacagaagtagagaaaccaggaataggatcaaaattggaggggaaggggaaaagggccttttgttttgagacatcaacttagaattgttgatgggctatccaggtgggtagataataaaagtttttgtgggggaggactaaaactaaagagttagacttaagagagaaatacttgagaatcacttacatggagatagatgatagttgaagttaaagaagagaacgagatttctaacggagggaatacactatcaaggaaaggattagagaaccctgggggagtgtgaatatttgtgcctcatttaattttcagaaccagatcatgaggaaagaatacttcccattttagagattaaaaaacaaaaccgaagcacagtgcttaagtaactttctcaaggccatataactaataagtggcagatatgagattttgagccctactctaaaacttgctcctcaatttgaatgtttacatatttatgtaaataatatattttacaatattaaaaacgtttttgtagagatacaataaccatataattttacaggattgtcttttttatttacgtttttctttggagtataatacatttttaattattggcctgagaagaagatacaatagattatttttggcaaatggtgcactcattcatgagagacactgtattttctaaagcaggctgatctctgcataatactggctccctgaaaataaatccttgctgggccgggcgcggtggctcacatctgtaatcccagcactttgggaggccgaggtgggagcatcacgaggtcaggagttcgagaccagcctgaccaacatggtgaaaccccatctctagtaaaaatacaaaaattagccgggcgtggtggtgcatgcctgtaatcccagctactcaggaggctgaggcaggagaatcgcttgaacccaggaggtggaggttgcggtgagccaagatcgtgccatggcactccagcctgggcgacagagcgagactctgtctcaaaaaaaaaaaaaaaaaaaaagaaagaaaaaataaatccttgcaatttatctgccatattgaatttgttctggaataatggggataaaatcaaaataggaaataaagtatcaattttattccactattattttatttattattttcatcttagtcatatggaattatatttataggaacatgttaaaatgcattttcaagataattattgcacacaatttaaacaattgttttgagtgactttttgtagaggtagaacagttctgtaaaattaaggtttggctttgctttgtttgacctagattccctattaatttcaaaataaatgtgccttatatttcaaaatcggatttcgtatatgaaagctcatgtcagttcacaacaaaaaaaaatcattaaaaaagaatagtgcgttattttattactgttttgatagcaatacctgaggataccgtaaatgtgtgcatgtacttttgtttacaaataaaaaacagttatgagaagacaaaaaaatctaatgtagaataatttattccactaaaacccagctttcctcatggaaatcatgcaacacctagtgagattatgctagcacatagggaaatttcacaaatgcacattcttagacatattaaccttctggatcagcattcaacaaaggtaaaataatgtacgctattgatatcagactccttagctccctattctggctcccttttaactatcaaaacacagtaatctgtgttttccttctttgtacatcagttattgtacctgccactctttataagcattcacttttctcttgtttttaagcacagtggtagcaatggccatgacttagaggcttaatgaaatgaaggacagattataaacaaattaaacccacactgctttctttatagaagcagctgcagagtgttctgaggtttttttttttccttgttgagtaaaggaactaataaggaaaatttcatggcttcaaggtctagagataagaaatgaaagttgtaacaggagaggagctgggaaaagcacagaaatgtagatttcgcggatcatgatgaaagccacaggtgacttggtgaccacagaaatgagaacacagggttgggtgtctaggcaggaagttgggaggctggtggagtcctggttcaactctaaagtctcagttatctcagcacatgctcttgtggtgctgctgagatttggctgattgcctaccccaaacctaaaaatagccgagcctcattcttttgtagtggcagccagaggcgcagctgtgtggggactggctatctttttccttagctttgacaaatagctgagagttggtgggcttgagtgtgcacctgttgagacagaaagtgctgagtttagttgacaacactgctgaaggtaatttcacactttcattccaattgatcaccgaaacttagaaaaattttctccttttctaaatccttctccttgcccatgaatatatacatacatatatttttctcgaactgtttgagagtgattgttaccaaaggcaattgtttttaaatcagaataacaaatctcctgtttgagtggctaactcaaattttattttcttatttaatttagtagaatttaaaagatttaaaatagttttgaaattaggaaataatatttttattcccataagtctaaaggtacaatctagcccattacatcactataaaaaatcatctccatatttattagattacaggatattccgctttaaactagaatttgcgttgcatacatttttgcagaaaaactcattcttaattttttctaaaacagtagattggatatgtgttaaaggttcatgttctagtacttctttaaatgcttattgtcagctttataaaatcattttatcacaaaaagttagttttctgtaggcttattttccttgataggattccttctcttacaaactggttatatgaattaaaatgtaaatgttagtgaattgtcatatcttgtaaatatactagggtagaactgatatctttatgcaaattagaaaaatattttacagtatcagttatggagttttttttctactcttcctttttctttgttaatattggcatgtgatgaaatcactactttataagtttgctactttgattaagactcagaaatcagagtggctgggtgtggtggctcatgcctataatgccagtactttgggaggccaaggagagagaggatcccttgagcccaggagttcaagaccaccctggacaacagagtgagacctcatctctacaaaaaaaaaatgaaaagaaatgagccaggcatagtgacaacacgcctatagtcccacctactcaggaggctgaggcaggaggatcactggagcctaggaggtcaaggctacagtgagtcatgatctcaccattgcattccaacttgggcaacagagcaagattatgtctcaaaagaaacagatcaatcagagaagtaactttaaatattttaatataaaaaaaggcaacatctcttagcaaataaaaatagcgacgtccttctctttctgtaaatctatccaagacatgagtgctgttatcgattcggtttagggttttgttttgtaatatttttttcccctttcacagcaatacattttggggtatggtttgctgacaatattttccacagtaatcagtggcttagctgtaaatagaggataagtattgcatctggggaatacacattagaaacaattggtatttctggttcatataaaggtggaaaaatacttggccagatgggcacttatttatttattttcctgaccagaaataacaggcaatgtgtgagaaagtgtggaaagcactgggttggccgtcaaaagcaggatcttacaaaggttgaaggaagctaatctgctgagaggttttctttttttaatgactttcacatagtatttttcaaagcctctgtgcattaacactcacgccaaaggaaatgatttgttttttcaagcacttggtcagtgcaatagctccgcagctaataatgacatatggcaaattttgagtacttactttgtgctacgtactgtaataagagctttgtgtatattatgtgagtaaatacttaggacaagcctgtgagagagctattattgttcccattttacagatgaagaattctgagttagaattagactttgaaagtcaaactttctccttccctatcccttgctgttatccaccacatcatgctacctccctgagctcagtgattacctacaatgaggtttaccagcttgtcctatagttacctgtgttataactgccatgttcctgaaataaattaactataaaatggtgcccatcgactgatatagagaccagtcattttttttttatagttttatctggcctggggttatcaagatactaggtttaatagaacttacttccagatttaaatgtctttgttcattcatgaaaatcaattgattggatccaatgattttagatctagacaactgtcagtcatgtaatctaactaactcattgtttaaagaggcaactgaggtgctgaaactttcaataattggattaattttatctttagtcagttatatcattagaacctaggtctctatttcttaatctcaaccaaaatatacatacatacatatatgtgtgtatgtaagcaccatttctgctaatttacaaaaacctagcaaaccagtttaagaaaaaaaaaagtttcctttgctcatgtaacgaaaaagtgaagaggtattacttacttcagatacagttagttttgggatctcaagtgatgtcacctagcccagtacctctctcaccctttctccactgtgttttcaaaggctcttaaaaaaaaaaaaaaaaaaagctcttagacattatctctcgatatgggacccattattagtcttagacttatatcattgtacctcaattccaatagaaaatgaaaacaccattctctccaacagaagacctaggattacttgtaattgactctgaagaaatcacctacacattcctgaatcaatcaacctagttcaggagtacagtgttctgattgggcaggttccatcagacacccactcctggaaccagagccaggtaagttcaacccaaaactgtcagagaggagcaggggtgggtaggccacaacgaacagagatacaacaagacaaacagtgaagaagaagatgaaatgggtagcaggcataataagattataaagtcttgtaggtcccaaactctgtgtgtatgtgtgtgcatgtgtgtgtgcgcgtgtgtgtgagtaaccctcaaaagtatacaagtattgtgcttcctgtaatgacagacacccttctgttgataataatgattcatgtagcccaagaatataagaaagtattctgtttgtaaaataaatatttagaatgggaataaatttgtataaacagaagcatgtttgattttctttaaaaagtgcgtgataaatatgatgatcccaggaggtttgttcgttatttaaatgtttaaacatgtgatatgtctctttcagaataataaatagtagggaatagcaatatagcacttttcggccgggctcagtggctcacgcctgtaatcccagcactttgggaggccaaggtgggcagatcacttcagatcaggagtttgagaccagcctgaccaacatggtgaaaccccatctctactaaaaatacaaaattagccaggcgtggtggtgcacacctgtaatcccagctactcaggaagctgaggcaggagaattgcttgaaccctggagacggaggttgaggtgagatcgtgccattgccctccagcctgggcgacaagagcgaaactccatctcagaggaaaaaaaaaaaaaaagcactttttaaaaatcataatggatttctaagattgtaatagttttggtatgctgattggctttatttttggctacatttattttagaatctctgcattatcaatgaactttcattcaatttcttttctttctttttttttttttgagacggagtctcgctctgtcacccaggctagagtgcagtggcgcgatctcggctcactgcaagctccgcctcccaggttcacgccattctcctgcctcaggctcccgagtagctgggactacaggcgcccgccaccacgcccggctaatttttttgtatttttagtagaaacggggtttcactgcgttagccaggatggtctcgatctcctgacctcgtgatccgcccgcctcggcctcccaaagtgctgagattacagtggtgagccatcgcacccggcccattcaatttctaaattaggcataaaaacaaaattatttcgtaacatttctacaatgacctcctttttctgttaagtttctaattctgaagacccaaattcaattttatatttcagtatctcacactgattattctgatagttacattaaatccctcgtttagaaactgatgcaagttactgttttcaaatgttcatgctttgaaagtacatgtttgtcatctgatttcaaatctgcatggttccatgctgattattttagataacttcaggctgtactccaatttttttctgagagatctctgaagtaagcttttcttactctgttacaattttaatgagatacattctatgtattagagtgtgaaatatctctttaggacaaaatttaatcatagtcagtgctccttatttaaaggctaaaggcatcatcaatttggcaaaaaataaacaacactatctggctgcctgagggtccagtgactgaccttgagttgaaatcccagctgcctgcatcatgtgaccatcaacattctgtttttatcccagtggtaataaataccttatactcaaaaagacaagagcaactcagaagagagatttggtacttttcaaagaaacgcagcagtaaaagttgcatgatgcttttcatttcaaagcaggcaaacagagctttattatggcagagcagtccaatttaattttcacttgtgtgatgaaactattccacacgtttgcattaatttatgagcctttgtctggttttaatgtatttaataatacatttatacactctttgttttaaaaataatgatatgttttgacaatgcactttttcaggaaaatctgaggtgtaacaaaaagtgataatggtaagatagttcccattttgagtattaaaaaatgagtgcatcaggtaggattgggtttggctgcgtgtatcagaaatccagaaatagaagtgtgttaagtaagagagatttgttgccttgccacatgagtgagctccagctggaagcagtacattgccggtagagcagggccatggtggtcaaggacccaggaaccttccatctttctgtgcaactttcggtcttcgatgtaacatcattgtctaaaatggctgctggacctccagcctctttccaggtgtcaggaaggactccagcagagtgaaagggtttgtccaatttaagaagcgccctttacacagctttcctccaaatcccactggatatttctgcttactttcccttgcagtggattatgtcaaaatagtctaattccttcttttataacaattggagttgaaagctttgtttcaatctctagtgacaatactttagattctgattcccattctctgagggcatacatccgtgttactaggttgttactaaatatgcatgaatcttaactcaagttttttaaaattccagtttggaacccttggagaaatcaatacatctgttcgtattttgcccaatagtctctatgagtgctttatctaaaaatcataaattcagatacatttttaatatcatgagactaaagaaaatatttcccgttgtcaacagatatcaagtttcagttataaaaaatgagtaggttctggatatctgttgcacaacagtgtgcctgtagttaacaataccgtattgtatacttaaacatttgttaagagagtagatcttatgttgtcttcttattataataaaataaaataaggtcgggcgcggtggctcacgcctgtaatcccaggactttgggagtctgaggcgggtggatcatttgaggccaggagttcgagaccaacctggccaacatggtgaaaccccgtctctactaaaaatacaaaaaattagtcgggcatggtggtgcgcacctgtaatcccagctactagggaggctgaggcaggacaaccacttgaaccagggaggcggcagttgcagtgagccgagattgcaccactgcactccagcctgagtgacagagtgagaccctgtctcaaaaaaataaataaaacaaaataaaataaaatttccgtttgtatactgtctttaagacccaaatcaattctctctgactctagtgggcactgatatgttctactgaagtccccatcaccaggtagcacacccatcccctagctgctgggagtgcttgttgcccacagctgcttccttctccagagacttgttcttaccctgaagaaagccaggagcctgaaaggccatatgtgccccacctcaggtcagtttgcaaccaacgactgaaagtacaagagtccaacccatttgccacaaggtgagatcagctctgggatgcaatttgccctccagagctccctgtgggatcatgtggaaattggtctctaggtgagatcgcattcttgttttgttttccccaagccctaaactgtccccttcacacagtttctcttttgagcactttctctttttattttattttttgagacacagttttgctcttgtagcccaggccgcagtgcaatggcatgatctcggctcactgcaacctccgcctgctggattcaagcaattgtcctgcctcagcctcccgagtagctgggattacaagtggagcgccaccatgaccggctaatttttgtatttttagtagagatggggtttcaccatgttggcaaggctggtcttgaactcctgacgtcaaatgatccacccgccttggcttcccaaagtgctgggattacaggcgtgagccactgcgcctggcctattctaattttcatcccttcactcacaaatgctatgttccatcaacagcttgagtgtgcacatgagcgcacacacacacacacacacacacacttctgtgcttgctttttcgtggctgcaaacctgctctcttgtgaatccctgaatccacgtatgaagccgaagcttttatttcattttattttttagttgacaatataattatacgtatacctggttttttttttttttacattaactcttctccttatttcagctgagtttctatttatgcacaatatttattgttccgactcaggggaagtttcaagacacaaaccttttgacagcctaaattagttcaggtctaattcagaaacagaagtttccagattagaaaacctgaagctaaagaagtgcttgaagaggaacagggattcatgcaaaactagactaggtaacagagttactcatacacaagaatcttggcaagggttgaagtgggcatgtggaaggggctggcttgaaaatcaggagggtcagagaaagagctgttattgttaccctttgttcctcctcagatgtctatgcgaaaggctctctgagatgagagcacgatatagctcatgccggttcagccacttaatcttttttgatttgactgcacccaggtttctttaaatctgagctttagtttccttaactgtaaaataatggaaaaattcctggcccctcctcacctggttgctatgaagattaaatgagataatatatggaaaagtcttagcatataataaggtctggaacatgatatacatttaataaaataatacattttacttattattatcttatacctttcatatgaatgttaactgcaaaacagcatagccggtatttgctccttcacaatagaaggtaatatgcttccctgttttactaatcagaaaactggcctcgaagaggttaaattcctttcttagaactattaagaggctaagccacacttcaaactcaggtgtgtctgactctgtagtcaatgttcttttcacttcatggtgcttttttcctgtaaagtgagtataatatttcctaaatcataataaagctttgtgcattggatgacataaatataaagggcatagtgtataattggtactcaataaattattccttttcctccttccctaggcaagaactaattttctttctttgtttagcccctgtattaccagccaagtgccttgggcataatatacgtaaataggcctagtatgttgaattttaggcagccatcttgatttttgtaacaaatctagttctctttaaactattgcttagctcttccaacaataacaggccttgtagttatcccacatggggtgatttcaaagccacagagggaagattgttcttaagttactcctgcatgcagtgtcaagctctcacaactttcacaagaagttaaaaactacaattttatgtcagtctctcctccagtaatcagatagcttctttgattgttctgataacccaagagggaatccttctgatacagaaggtggctatatctcatatattttgcaactcctcccaaaacatagatcgatcatctcaaagaactacatgggaaacttgatagccttttggaggctgagaaagaaagctaagccaaccttgaaggaagtcaacaaattgtcaatggcattttgaaaaactgcattgcaatagacatctacactcatacgttatttagctcccttagggatatgattactcttggggtccacaagattcgatgcatgatcatttgagaatatttgtggctactattattttttaaacagatcaacaggcatgacagaatttcatgcatgaatttcatgataaggcattctcaattttatgttttcacttaagtgattatctctaatgttcatctatttccttcttatttcaatcctaccctagtttcaacccatccttttttatttttttcttgtttgaagtttaccctaatttcatgactgagcttctctaaattccttaattaagtcctccttgtccatcccagtacaaggtgtaatcactttcccctatatctggattgttcatctggttgttatgtattgcattaagttaatatatgcaaatataagccttgtaaatacagagaccaatgcagtccaattttgggtagatgccacattcaaaacaacaataacaaaaattaattaagtagtcacacacttaaataactcaaaagtgttaaaacagatatgaagaaatccacagcaacatttattataaaattactctttctcttccttggttttgcggcttctcgagttcataggagactttcagtttccagtgacctggaaactcaccattcctcatcaccatcctttactgtagtaacttccttttacctgaccaccctgcatagtcacagaagatgcactcctgacaagtgatcctcaaaacaggtagtaatctctttgagaagtgtgaaatgtcttttgttctccttgtcgttcccatgattgtcagctgtgaggacccttgtcattctaccctcaatcccaattctgcagggtctggggattctggggattcttttttttttttttttttttgtagttaccaatcttatatagatacaataatttttatgtgtattgatgtttattgacaaccagattttaaggtccttagaaattggagttaattattatttatcatccaagctcctttccctctgccctcttattttccaacacagtgtcttgaattttatcactttatcgtttagttattaagggtgatttggtgaaatgtagaacagactatatgaattacctcagcttatggtattatatgacataataacagaaacataaatagactatcataaatcttaactttttctttattctttgtaatattttattagtcttatccatcttgcttggattgccaagttcttctgagaattccagtaataatgttatcattctatcgagcttattattcccaactgatcttctattaagccagtatgaattagctactgtttatgagattagattatgcactttaatctctagaagaagcaaaagtaatgaatacactgaatctgccactgagaagacactttaaactgaaatgtttcattatttttctaattcctctctcttttgaatctgagtatgtttttggggtacgatacagtgtaaaggtttttgtacatcaagtcatagacttggaaataaaacacaaacaactacccttttgatgaaaatacataaacatcatagccatttagccaacttttaaatttaaaacaataaattcatgattttagttggagggtaaacatgcatctttttaaaaatcaaatgtaaacacagaatctatactcatgatgtacacacatggacataaaatattgcatatattttgggagattcaaagaccactggactccaagttaaggatatttttctctaaataaacttagtgattgaattatagaaaaccacaaactaagttattgactgaagtataggaaaagtatagtgtattaaaataaagttttggactaattaacatgattttactaatagtgacaagaggatttaccaagttctgattttttctaatgtaaaaaaaatttgttaagtaagatctttcaattagtaatttctgaaaccccctctaagtaaattaaatttttatatccttgaagaaggatgttgatcagtctcaccttatggcaagtatctcaatatatgtgatctgtcacctagtcttttctctattttattatttctgtgtttgttgagaaaaaaattatttgtatacaagtgcatgtactatttaatgtcatgtaattaaatccctttgatagaaacagttaatgttagactaataatgtttttagctactggtgaaatacttcctcctaatgcgttaaatgcaggataagatcttacttgatactaccacgggagtgtaatctctcccaatagtgtttgtttcatcgaagttggctcatttaggtagtttgagtggccagagttgtataagtatgtttggcagtggtggatggggaatggacagcaccaaaccattctttctctctgtttcgatttttctcctttgtctattgctagttgcttattcctgagatatccttcacctctctcaagaggcttggtcacttaacttcattccaactctacacctccattggtggaaatggaaagatggatgaaattttagcccctgtttatggccagcatccgactagtccttctttcaaaaatgagtaaataaaaacttattatggtatctttgaaaagttgcctgtctatgctctaggctttaactcaataaattattttaatggaaactgtgaattcaaaggaaataaaagtatggcggggaattatgcagaaaatactgtaatatatgttgataaaattttcccaagttaccacacctccagtacctagaacatagccagccatataatagacactcaataaaggtttgttgaatacatttgtttaatattcctttttactcttttcctcccctcttctttcccatgcatttctagttactcacatttataataatatattcagtacattttttgtttgcgtcaagatgcatcatgagggaatcacctgaaatttcaagtcaggatgacctggttagaacatcagttccaaaactgaatatttagagatccttttcctatctataaaattggatcacaaaatatctctcaaagggtacaaagcacagcaccaaccatatattaataataaggcactgttacataaatgtcagttcattttctcatcaccttcttaaccattttgctctctcttctgtttcaagacagtaaaatccaaatctctgtcagtaaaagtatatctgaccactctaatttaataaaatgcagcaataaattgcatgactcatttctcaattattttgcatgacttactaaaagtataagacagggtacctgagggatctgtgagggaaaggaagcaaaaatcatatacatagaagtggttggtttcaagtgattaagaataacctacgagtaggtgaaaaaaagaatcaggacaatacaatagactgcaaccaaaggtggaaaaaactgtaaaagaaatagctttagaggtctcaaatctgctttcagaatgctaggatctagttttcgtaaattagagttctcagtaaatgtaggacaagtcccagctgtactactgtagcattaacattaaaactaagccatatcttgaatctccttttctcttaaacccccagaggtttcaaaccagagaggtggtcaaaatagattcccctactacttcccctttctcaataagaagctctcatctgttgaatttccattttgaggcatttagacagctgagagagagagagagagtttaaaggagtgttcaatccatctggtctgttttttccccaaattgcggaagttatcatttcagtaacattatatgttgttaagcttatacaataagatctgattttaaaacttaccacataaccacagcaacaaatattgtgttatattgtcagaaggattgacacatagatcaattgaacagaataaagagtctagaaacatacccacacaaatatgcccaacatatttttgacaaagtttcaaaataaattcagtggaggaagagtagtgttttcaacaaatggtgctggatcaatgggacatccacggacaaacaaaatgtacatagacctagacctcatacctactacagaaattcacagattagagtgagattatttttctctttcttacagaaatcacatccatattgtctacttctgtgaagttcagtatggtagccacttgccatctatggccattggaatgtagctagcatgaattgagaggtactataaatgtaaaatacacactggactttgaagacttagtgtaaaaataatatgaaagatctcaataataattttatatgcgttgcatcttgaaatgatagtatttgggatctgtttggttaagtaaaatacagtatggatgttagttttacccatttctcattatttgtaatgtgggtatcagacaaattaaaattacctatgtggcttggatcatagttctattgctcatagctagcataatctataatttccagtttcagtttctttatatctgaatgagaaataaaagatatttgtgaagcaatctgcacatagaactaaagatttttattatttttaataaaattttacatttgtctgtccaagcatttgaatcattttgcaaccatatttattgattatttctacaacattcagtttagattttgcataaataaaaacttttgtaagtgtatgacttaataaatattaagcaggatctagtctagttacttgggaacggcaaagccctcgtcttcatggagcttacatttttcagttgataatctttatgtaactctagaaataattataactggcttaactaagttagcttttgggtacatactcaacttgtgagagcggaacctcatgggtctaccaatgagttgagtattacctaaaagtatccatcttgccctgggcattagccaatgtacttttcagaggaaatgcagggtgtttgttaatctggcaaattacctgagtaggcattggttacatggaagtctattcagagattttcctctgtactacgttgtattgactgattgcttttctgactttctccctagattctgaattcatcaagagttctaggaggggggctagcgattaaaaaaaaggacacattaggtacaatataccctactcaggtgacaggtgcactaaaatctcagaattcaccactatagaactcatttgtgtaacaaaaaaccacttccacccctaaagctattaaaattaaaaaggaaatacaaataaaaataattttaaaagtttttgctgcgtgttagcacctatgtcagtaattggtaaataataagtgtaaataaaccaactgatggatgaaatattttgagagaacattaattcaaaatttaaaccagtcaatgtcacattcaagccagattgcccaacctagtatatcatgaccattgacttcaatctttaatatggattgtctaagtcattggctggaagggagcatctgtctttgttttgtcctttgaagcaaacacttgaaatcagtttagactctcatctagacatttttgttgtttagaaatatatttaatggaatctttaggctagattcagaagagaagtaagctgtcattacccaaggattgttaaccttatcaataaattcgtagccctagggcataaagatcatttgtattgtttcagaggccttcgtgtctagtaaattttctagctattgatttttgcaaatgtacaaaattaacaattgtgagagagcttttaacaagcttgatttcagttgaaataatatgaacagtaattgttttttttctgttcattgggtaataaaagcatgtatgtaattgggaggccccaatactgttgaaggtaaatctgatgagaaacaaatattcaaagactttgtgcatgcaagagaatcaatagaggcaaaaaaaaaaacctatcttctagagagttgacaggaatctatcttatttggaaattcaaaaggtattcatgcatttctgtgttctgtgccagttacattatttatataataaatgcttttccatattgctttttatttgaaattctcaatcctataactaattattttacttagggaatataactgtatcctttacgccttctctttgattttgtcaccatgatcatcaaaagtttctccccatcaataatccaggtagactcccagccacactcaaggcatcatcaatgatctcagagtactacattggattaattactaatttttcctcattgacttctgttttccacaattcaatatttttctaattttcatttatctgcttgcttcttcctaaagaaggctcatgtaagtttgtatatgtgacaccaatatctctttaatatgtttaatttccttgacgtttctaaatagggttaatttaaatttaccttaagacccaaattatctgaatgcaagtttccaaaaaaaaaagctatatatcaggaattttctaggattcaatttcaaaaacaactttcagagtatggctaataattcaaaggtcaacaaaacacctgagcccactacaatcccagtaccatacaggtcaaaatcaagatttggcaggattgtaggatcccaacgttctttctgatgttaaaaaatatatagtaaataaagttattttttgttcaacagtattttggaagtagtaattgccacattgtatatatgtttgccattagccataaacgtgattttaccaatttattttcactacattgtgcagaattccggaaacttagataaaatattttaacacctaaatatatacacacacaaacacacacacacatgcacacacgctactcttccatgcccccaatctttctctttatctcagagttcaagtgtagccatgatttgacattacaaaatagaaagagtactgttggtttacctgtcaaattacttttatcaagccattaatggtgcttactgtgtgccagacattttttctaagcactttataaatattaactcatttaatctttataaagcctttaaatgatatatgataatattctctctttacacaaaaggaatttaagacactgaatggttaatgagcatgctgaaggccacaccattcataagtggtaaatgggaagtgactctgggccattttgttcccaagtccaagcttttaaatattttcctctgctcttactagacatgatattgctgagaaaagttttggtcccctgtgcttgaatataagtataataattaagtcatcttcttttccatgctcaaattttactctcaaaatcatttttctgtgccacacacattttaacagtttttcattatatacttgttcttctgagtagaaattgactctaaaatacagacaaaaagaaattatatttaagataaagtaaaaaaaaattctgggtgaaggatacattagaatatgtgattcaatttttacaactttcatataagtctaatttctttcaaattataaagttaaaaatctttcaaataattactagtcgaattgaagaatatgaattgaagcagtaccatttagtgcataaattcaaggacacaattttcaagttatattttctatgaacagtcctccctgaagttgtgcaaggagaaagacctaaatcgaagttagtttacctacattaaaatgcataaaataataatagaaaaataaactgaagcaaggacaataatatggattactctccagctttcataactgtgtttttaaatgttcttcagcagaaattattcaagcgttgtttcctactacagaaagaattctcaggacttctcagaaatacgtcagtttttaataataccaatacctgataggagagcagggacaatttcagtgtcattcatagatgttgtcccagaaccaagacagcatctgctccatagtaggtacttaatttgtggaatggataagcaaatcagtgatacatatcgatggtgctttttctactttaaaccacttttaaatgtgttaatatcccattaatagccttctagatttatttgagtagaaattaattcttttatttgatagactagtaaaaggcagcctagacagtttaaattgctcattcaggttcactcaatgaatacacactgaggaaaaaaaatatatatatatatatgtatgtatgtatattcagaaataaagcccagccatgactttttgttcaaggttctttgtactatattccattctttgaactgaaaagaggagaaattatagaagaagcaatgttttaaaaaatagacataaatgcataaatcaggtaacacacttttttggatacataccccacaatacctgaaaaagtagtaagcaaagtcactgatatttaatagaggaatgatctgaaaactttacaaatcaaaataactttgcgctttcaatttttagaaattaagtatttctccttactgaattcatccgtatgtagaaaattatgctgtattatttcaccataagttttaatttaggagtatgggttattatttggaaagggaaatgtttctcaaatttacttccatgttttaaagaataatcctgttaatctctttctcacatcttctcatatatcttatttcacttttaatttcctgtaagcttatcattcctgttaaattactccttgccttttctcagcgatgattgataatgatattgttgagctgtgtctctttctaacacctagactactattcaaactatatcaatcactccattatatttttaaaacctagaatatactactgagatctctcttgacctggtattcctgtatcctgccatctccgatttcccacactgagcacctttccttccttcagcatcctttccaatcagttcagaaagctgcccttaatctgctattctgttgccaaaacaacatcattaatcactttcagttaccttctttgcttcctatacatcaaaacttgagcgcttcctttaccctcagttactgctccactagagctttcttgttttaacgccccatcttcttgtcctgtgtgttttggttttcttcctcttcttacttgatgcccttgttttctttttgtgctattattaccttcattttattttctgtgcatgagcattgcaaattacaaaatcatctctttccccctttgtttactacttatttggttccggtacttcttttattctgtttgtataaatatgtactgaaagcaactgcggaaaaaacacctagatgaattgtgatcctatgtcgtcccttagctgagaaacatttcattcctgagctgtattatttgtcttttctctgaatacatttttttttcatactggctattctcctgtatattctaaacacacctttgtgtaatttaggtgaaattgttggaattataaattgtttagttagtagttgtgaatcatgcttactacagacatgtattatcaaaaatttcacaagaaggatagcgtgatactcaggcactccccacatttcctcaagccaccaaagagttttttgatggatgttcttgtttattggatgctctaaaactagacagacagtaaagattatcttttcctgctgctgaagtttaagtcatttttcccctaacttttattcacacttccaattatgaacttctaacacataaagaaaattgagatttttgtcatgcaatgctgaaacccaaactgacatgtaggaggaaggagcagcagttctgtgggtttgtcaggatgctaaggacatgttgtttttcaaattcgttattagagtcagtgagtttattaggctgaggtagaaaactgtatgctattagtcaaatttaaactaaattcctaaactcaagtcccttatagctcaaaatctgtagattcaagtaaacacttctagaaatgtcctaatatcacattgaaggagatgttcaatatgattttaatttagctgtctaagtctgtatgcaaaaaaaaaaaaaaagaaagaaagtaagtaaagcaaagcaaataataacctcaagtgccaactctaattaattggtagtatcttcttgaactaaaatgtggagaagtcccatctggcctctgtaggagagtgcaatgatctattagccatgctaatagatcagcccaggagaaggaagagaacaggattgttgattgcctgtggaccctgttgtgctagaacatttttcgtatgaaagtctgcatttcaggtgtggtaaattgtttatcagaccacttattttctgatgtgttctactttatttctgatacttgattaaaggtatgctgtgaaagtagtgtagtaataatgactcctaaaatgagtttatgcctctgaaatatagacacacgattcttcttcaataactctgcttatctgcttttagaaagtaagcccggaagtttacggactattgcaatattagattttaccatgtgtgtttattattgataatctaaaggtgaatttattaagctctacattggctaaggagccaaggctaaggattacaattaaacagctcaattatatttagcaagcaaataaaaccttaaattataaagcttccaatgatagcttaaagctcagaaatggccagttttttaaactaagcaataaatatatttttaaaatatttatttctagtgttacacagatgaatttggcacaagcttttcacttccttttgtgaaaaacttgttttgtgcatattccgtccactattttgtgtgtaatactctgtcatatcaaattcgattaattaaacaacctttatgggcatgaaccagccttggtctataacaatttgcaacttcaaagagacaaagtgattttcaaattactgcctaaaaatctatttaatatatataaataagcagaaaaaatatctatagtctttactggagaaccatgcagtagggtggggggagcatatggattttattttggcaagtgaagaaaaaagttattaagacatacaatacaataaaaaagaattcacaacatttagcaacagattggctgtgggtagcagaggctcatgaggagtcgacaacaactttctaagatattggcttagaaaacatgagtgggttgacttacatgttgttttctggagttgagaatgtttttactttgaagaacttttaacctcctctacaagactttttagctacgaggtccccttatcactatgagtaagagaggaatgcaattctgagcagatttctcctaaaactttatatagatagatagatagatagatagatagatagatagatagagatagatatagatatatatagatatagatatatacacatatacatatatatatatatatatatatacacacatatatatttttgagatggagtctcactctgttgcccaggctggagtgccgtggcacgatcttggctcactgcaacctccgcctcctgggttctagcgattctcctgcttcagcctcccaggtacctgggactacagtcgtgtgccaccatgcctggctaattttgtatttttagtagtgaaggagtttcaccatgttggccaggctggtctcgaactcctgatctcgggtgatccacctgcctcggcctcgcaaagtgctgggattacagacttgagccatcgtgcccggcctgtatttttaaaagttgtctttactgaagaggtctgttctaaacacgtattctgtgaggatttgattccatcattttcacacctgttactggcctgacatatcacaatgttttatgagaaaatagaaatgttatgaattcatttttaaattgtatatattgtacaaatttgtattaagcgaagccatggcaggatagcagtctattatttgccttctgtgcactgcagagttccagcagaggtggactttcctccagtttattagagaattttaaaatgtcaaacttcagtcaatagtttatgctgtttctagacctaatataacaaataataacctaatattgcaggtcattttcagaagcagtaaaatgctattatcctactaaaaatttttggagcacaatcacatgatatgaatttcttacacaagcatataagcaataaaaattttacagaatcttaagtgaggaaaaatttgaaaatgctaaaaaaaaaaacagcataaaaacagagatcagaaagtggctttgataattcaacatagaacagcctttagcttttgggctatggctctcaaaatatccaaaaccagttatttttggtgtgtgcgtgtgttttctgattctatttgctcccactcttccaacagcagtcccctgactcttccaatccctcagactcaaaatctttgagtcagtttcaagtattcgtccctttttgtcaattcccattaaatctgcttttgacacatctattcacttttatctttttctaagtgctatcatcctagtgtagggcttcatctccattttcttactaattattttttcaactttcaaagaatcctagaagtgtacacttattaaaatgcatttcatgctttggccctactttaaagcctatactgcattgatttgaatatacacttcggcagtcaacgtccctaaccatctgatcataagctaattattaaattggtatttgatattttaatggcacttgaaaatttcaaagtttccacagttattttattggattttctacaaaaccatctgtgccaggtagtttttattacctatctcttatccaagaggaatataagattctttgaaatttgacaacttacagactacaaatctagcaggtgttagctgtggaacttgaactcatatcctcagattctaaaacagtgtcttagtcacactacccccagtggcttccctctctatccaactctcactgtccagatcatgttccataaccagagttacagaacaattataattaccttccccatccaaaggcttactgtgccacagctcatttctagctgaaattatttcattttgagagatgaacttggacaattaattttggaaatatgaatgcaaaataacttagtaatttaacaacttcagattagtgtagggatagtttcaggagtaaattaaatgttgttgactaaggaagagaaagagaaataatgtgataaaaattattgaaaaggggtatacggtaagccttgtgagataaattctctctactcttgggcttattcgtggtagacatagagctcagaataggttttgtgagatgggaaggaggaattgtatgagctgttattgagagattaaaggttattctgggaagaatacatgtttcagaaacagcaaaaggtgggctcgattcctggttgtcactcattagtcacgtaaatttggttgtgttgtttaacctttctcaacctcagatttatcaataataaaatgggaataacaatatcaccctttctggttcctaaaatactgaacataatatatataaagagttttgtaagaaataggcactcatacataaaaaatggttttattctctaccagcatttgaccttgggcacattatttaacctctctgttcctcaatctacctcttctgtaaacatggggaaaataacagcacctacaccttgttggactgttgatgattcaaagagcagccgccatttgtgatacccttagaacagtgctcaataaatgatataaatgatgtgactaattgataaagacaaaagtcttgtgtttcccttagaaagatgatctaactatactgagactcaatttcctcatctgtaggattgggacagtaatttttcctttaatgttttgctttagtatttaatgagatacgtgacgtatttcatatgcaacaaaatgctattacaatgcaaagagttctggaatatcgaatatgttacaaaatttggggagaaattattagagtaatagagaatttttaacacctaggttggacatttaattcattgatagagttctaatttaaataagattaaaggtttaaaaatccttagttttgtctttaaattttgttatactatcttaaagtttgctaaaaaattgctgtgtctataagtttactagatcatcaccggcaggcaagaccaagattatcatctggatgagttctgtttgttagagatagtaaacacgtgatatctactcaacaccctttgagagaaactcacatttcctcttgataaatgaggtcagatattggtatcatatttaatgtcttcttcaaaagatcgcaatctaagatcactgaaggactttagaatccttgctggcttttgaataatagatttctaaacttaactttgccctgccaaatttatgtatttgttttaatggaatgtatttaagggttccatgtaccattgtgctatttttgcatgcccaggcatgctcggctgagaaggcaggtgaggactgaaatccagccctttgtaaaggcatccaagacacactcatgggattgtgtctgccctgaggaagtagagccttccttcacataaaggcagtgtccctgactaggctgtggccctggtagctgagtccaccctagaggacactttgcctctatttttcctaaacgcgttgctgatatccctcgacttacagtggggttatgttccaataaacccaccataatttgaaaatattataagtggaaaatgcatttaatatacctaatctaccaaacatcatagcttagactagcctaccttaatcatgctcagaacactgagattagcctatatttgggcaaaattatctaactcaaattctattttataataaagtgttgagtatcttttattcagtactgtacttaaagtgaaaaccagaatggttgtatggatacttgaagtgtggtttctactgaatgtgcactatttcataccattgcaaagtcaaaaaattgtaagtggaaccattgtaaatcggggattgtcattatatactttagaggtaggcctgaatgtgatatagataaaaaattgattgtatttttaaattgtatttaaaaattgaggtatgcaattcctcaaggatctagaaccagaaataccatttgacccagcaatcccattactgggtgtatactcaaaggattataaatcattctactataaagacacatgtacacgtatgtttattgcagcactattcccaagagcaaagacttagaaccaacccaaatgcccatcagtgatagactggataaagaaaatgtggcacatatacaccatggaatactacacagacattaaaaaagatgtgttcgtgtcctttgcaggaaaatggatgaagctggaaaccatcattctcatcagactaacacaggaacaggaaaacaaacaccgcatgttctcactcataagtgggagttgaacaatgagaacacatggacacagggaggagaacatcacacactggggcctgttggtgggtgaggggctatgggagggatagcattaggagaaatacctaatgtagatgatgagttgatgggtgcagcaagccaccatggcatgtgtatacctatgtaacaaacctgcatgttctgcacatgtatcccagaatttaaagtataataaaaaaaaaattgaggtctgcaacaggcaaagccactaaagaaactcagatatttttcattgtaatgttgaaaaagttatgaaatttcactaagcccgtgtctatgaagtgggaaaataacagtgatatgaatattatatgagaacatatttgtaaaatatttgttgtatgatagatacctagttttgaatgttagctatcatttttggctcttataataggttattggaaggtaggtgtgactcctatcttttaagcatgcagaatactgaagtgataaatttcatcattaattttcagacctttgacacttacttcggtgtttaaaaatattgatgtatgcagacagtttatctcctaaatatgagggaatgttatcatgatcactcaaaggatataccataactcatctgacatttaaaatgtcagtttgattgataaatgagagtcctgggtagatgaatgtgatttaaatggggtttggtttgcatacagaccaaataaataatgattcagttctgaagactggctagactagggctagggcaattaattggggtgctgggacatgatatctgagcaacagatgctaggttatgctgctttggtcaccaacaggcctgctccataacaggcaataggtacatagacctgacatttaagagcagttaatgtaggcctcaagaccttgaatggtaattaactaacatgaagaaatggaacagagtgtcaggattatctattatggcacaatttcctattctgagcatgcccagtggtgggtcagaggggaggtcaaggaacagatgggatcaggaagtaaagagagctctttccagctaggacaggcctgaggggaccgaatagacaatgcaaggcagagaatgagtcacaaggaacaaagaacctggcgaaaaccagagccacactaggtttctgatgaagctggccaccatgggcttctctcatttaagacactctctcaatccctcacgttcttcaggttggcatatgactgaacttaaaggctggagagctgcagcctacatgaggctagcaaataattaatgcattacagagcacttaaaatatgatacagaaatatacaattctgcatgtaaatccaagtattatgaaggaccaacacagaaatatataggcaataatattatgtgaggccataagataatgactttttattataataattatgcctgatctaaatgagctatgtttgatttctgtgtactttcatagctttatagccaagcatgacttctctgcccagaaaatcctgcctgatttactctttagcttctctctaatttactttctttttttgagatggagtttcactcttgtctcccaggctggagtgcaatggtgcgatctcagctcactgcaacctccacctcctgggtttaagcgattctcccgcctcagcctccagggtagctgggattacaggagtgtgccaccatgcctggctaatttttgtatttttagtagagatggggttttgccatgttaccctggctgtggtctccaaccctgacctcaggtgatccacccacctcagcctcccaaagtgctgggattacaggcgtgagccaccgctcctggccctactttacttttaccagctagggactgtttctcattcaatacatatatttgtttgtctgctaagttggatgtagtagttgagtagtggagttgaaaactgagagattgacagcagtcagttcattgaggattgtgttatcacgtgcactgggttagatagtgcaccctcaaaattcatgtcttttctggaacttcaaaaatgtggtttttgtttgcaaatggggtctttgcagatgtaattagttaagatgatgtcatattggagtggggtgggcctttaatctaacatggctgatgtccttataagaagaagagaagaaatacagagaagacacacagggagaatcccatatgacagaggctatcccgagtgacgtgtctataagccaaagaatggcaaggattgctggcaataccagaagctaagaaagaggcacggaacagactctctcctagagtattcagtgagagcatggccctgctaatactttgattttgaacttctagccaccagaactgggagacaatatgtttctcctaaaaaacaaacaaacaactacaaaccctacccagtttgtagtactttttaacagcagccgcaggaaactaatacatcatggaaatgaatttaaacatcttattatctataaagaatgtgaactgtcaaagcttactgttccattggacatcagtttcgtgtatcttttatcgtataatgcatgactagagtaataatttcaaaggacattaaaaaatacagacattttcttgaaggtacccaaacgtttgaattgtgggtcaggccaatatcagcaagggcatttgatagagtttctcacaataaccttctgtgcatgtaaataactgtatcttctcaatagatttgttattgtatatttggtcttgtagacttacccgaggaagtcagataatagcgtatttcgatatactgtgagaaaaataggtacacactaaataggagtatgaaaatacacaaagaattacccatcagcaagagcacattatatttgtttttcttgaaacacccattctttcctccttctactttgttttatttttaatctggctctcttgcttatcttcaaagttttatctcccccaataaatcttcctgccatggtgaaggttaaatgtaactcttccatcatccacgctagcacataccatatgcatagaagttataaagtccttgaagacagagactctattttacacatctttgaattcaaagccctaaaatatttgagccctgaagaagttgttaggacattttagccaccagtgcatactctagtagtgacggtagtgatgtaagtacattcctcagcttttctgaacattagtgaagaattccttttaataaagagcaagattttccattgatactcagatggacaagttttggagtattctcagagatgaaaaaggattatttttcatttgatgtacatgtattctgtgattttgtgaacacaatggatgcttgctcttttcattattattgttattcctttgggtaaggcctttatgttgtcaaaaacttctatttaaaaaaagtgaaaataataaaacattcagccatttgcagtcaattattcttgccactggttagtatatttatttaccagggttcttaattaatgttactgagaggctcaaagatctgaaaaacagcattggttccaagtggctgcatttctttcttattcatttatttattttttagaaatgaggtcttgctctgtcacttgggctgaagcgtggtggcgcgatctgctcactgaagcctcaaactcctgggctaaagtgatcctcctgtttcagcccatgcctggttaatttttttttttttctttgtagagatggcatctccctgtgttgcccaggctggtctcaaactctgggcctcaagtgatcttcccaccttggccttccaaaatgctaggagtacagatacgagccaccatgcccggctagctggctgcatttctttaaggcccagagcctcctgtggtagcatctggatttgaaatgctggctgggtgcagtggttcaaacctgcaatcccagcactttgggaggccaaagcaggtggatcacctgaggtcaggggttcaagaccagcctggccaacatggtgaaaccccatctctattaaaaatacaaaaattagctgggtgtggtggcgggcacctgtagttccagctactcaggaggccaaggcaggagaatcgcttgaatctgggaggcggaggttgcagtgagctgagattgagccactgcactccagcctgggtgacagagcaagactctgtctaaaaaaaaaaaaaaagagaaaggctcataaacattgtctatgtctaagctgcaacaatgattgatattgtgaagattattaatagtgtgggtcaactgaaggggaaggaaaacaccaaaggagaatttttccctcccaaatcataaaggcattcatttttcagagaagaagagaggaatattactttcattaaaagaataggaaaattaaaattgttgttattagccacaaatcagggtagagctgtgtgaatccatggggagaatgtaagattataagcagaaatcaaggttagttttgtcttgtacttctggaataagaaagatgatatgtaatcagaccatgtctctgataattttgttaaattagatgaagaaaatcacatggataagaaaatgtaattaaatcactaaaaataagaatgtcattgttttcactttcttttgctaagtaggaggtgaggaaaataaccttttactctgtacatgagtaattccaatatcctcttagaaatgacaattggattgtaaaatgggcttgcctttgaccatattctgaaaggataatataatgagttggcaaaagaccccatgaatagagtttatgtagaaagcaacaaaaaaacacaaatataaagaaatgcctacaaccaaaggtcagtataattgatagcaagatttcaaggggaaaaattagggtcagggaagatataaaatttctgtctccttgttttggtgatttttaatctagaaataaaacaggaatagtgaaatattccatagtatatctaaatatccatctttgtggcagggagctagaaagattcaggattattatttataaaccaatttagactaaattcaaagactgaggagatacacctaatttagaagaaacaggagctctgagacctgactttgcatattactactaatttttttcttagtgctcgttttgctgcccaggctggagtgcaatggtgcagtctctgctcactgcaacttccgcctcctgggctcaagcaattctcctgcctcagcctcctaagtagctgggattacaggcgcccaccaccacgcctggctaatttttgtatttttagtagagacagggtttcactgtgttgatcaggctggtctccatctcctgacctcaaatgatctgcctgcctcggcctcccaaagtgctgggattacaggcatgagccaccgtgcctggccagggcctttttaagtattattttttcttctaaagttactgatgctcaaatgaaacctaattttgaaaaatagaatgtttgaaagaaatagattgaatgaaaataacacagctgatatttttagcaagattcttggatatagctttagaaataaactagccagaaggagcagtatggcaagattaccttttctttatatcaattagacatattgtatcgtatgacttatttagtactgaagatgtctgtgcctttctgcagttgtttttcatctattaaaagagaaagatactatctatgctatcttttcaagatccctgtggatttgaattttcaagtgtatagataaaccttgattgatgaaaaattgatggacaaaattaattttataacaaaggtaaagaagtgagtattgccttcataatgtgccccacagcttttaacagaatttctttaaacaatatttaatgtatttttaaacaattatatatttcaatattaaatcttaagtatgtttcaggaatatcttctttaagataattgatatatcccagttttcatacgttttaaattttttacgtctacagtattatattttcttttgaaaaattgcgtaacattaaggtagtaaataaaaacaaaaatagtttaatgtctcttgtgggaaatacagttttgttttgttttgtttgtttgtttgttttgagaccgagtttcactcttgttgcccaggctggagtgcaatggcacgatctcggctctccgcaacctccacctcctgggttcaagtgattctcctgcctcagcctcccaagtagctgggattataggcaatgcactaccatgcccggctaactttgtatttttaatagaaacggggtttctccatgttggtcaggctggtcttaaactcccaaccttaggtgatccgcctgcctcggcctcccaaagttctgggattacaggcgtgagccaacgccccctgcctagttgtttttgaccacatattttttctctgaaatataaatgatttgtagcccaaaagtttaagtctgaatcaattgtctgtagtaaatgctgcaccatctacatttgttaatgagaacaatacagaactaacttgaaaactgctcaaattttcccttgcataatgctcagtttttaaaatgtattgccttctgtcttctcaatgggattgctgctttttaaattttcattaattcctaaaccatattccattgtattttttttgtacatttgctttaagtgactgtctattggaggaaaagaaagtgtaggttttctggtgaattataatagcaatatgattcctggaatgaagcagcttttctcgtttggaatgaccataaaatggcaatacacttaacagtaatacccttgtctgtgttacagcaatgggtcttaatggttttccatacgtgaacttagccgcttgcctacagagaattactaagtaactagtatattccacatgtaaaaatctccagagggcttccacacactttaatacacgctgatatacaatataaatgcaacgtatcctgaagaaaaaaaaaaatcacaaactccgtgtgtggctctcaacaagctactattttctcattagaaaaataggaaagctggccaggtacagtggctcacacttgtaatcccagcattttgggaggccaaggcaggcagattacctcaggtgaagggttcaagaccagcctggccaacaaggtgaaaccccttctctactaaaaatacaaaaaaaaattagccagtcttggtggtgggtccctgtaatcccagctacctgggaggctgaggcaggagaatcacttgaacctgggaggcagaggttgcagtgagccaagattgggccactgcactccatcctgggcgacagagggagactctatctaataataataataataataataataatagtaaagctaataactatacaatatcttacctaaatgtttaagaacacctactaataatacttaaaaataccaaaatataaaaacaaaacatacaaatgtaaagaacatacagtcagtagtacagcaaatctatttgattacttttttcaaaattctattttaatttttttgctaattttaaagcactgttattaaaagaaaatattttcaattggttttattctcattgtatcttctagaaatactagttcattttaggaaaataaaaatagtgagagaaaacttttagctctgaatatggaccatgtcccatgcctgccactttgttctagtttttgttatttaattatcacacactataaaggagttcttaccaattcttttttttcttcagaaataattgattcttcagttttttaaactgctttattgaggtatgattggcatatacaccaattctcttttataggcaatgaaattggagatcagaaaaaattgagtaacttacctaagactacaagtaagtggcagagctagaatttgaccccagacaggcttcacatacaagttcacagggccatcagctgcctgaaggcagagaccatgatttgtatccatagtatttatgtatctctcatatctaaataaaatctagtcactattcagatttaattgatattttcaattacctttgtatttttaaaagaagacacattatagaaatttgatactaaatgtaagtattcagttctttagttaaattgaagaaaagcagaaataatattctgtattaatacattagtgaaaagtcagcagctaaaatgtaagagatgtttggtgacacaagtaaaaatggattgtatactttttgccttatactacctgactctggcatttagatataacttgttccagagacctgtcataacttatatgtttcagacaagaaaagctttgggttacctgaaatagtgtagttaaaaatcaaacgctgtactcatctagagggactttgtttatccattcaaaaatacatgaacagggctttatcttggcctatttgaactccatgccagagggcagcataacatagcaaagcatgctgacctctccttatcactgcccttgttgaaaaccttgagttcttcttaatagtctggtatatagttttaaaatgttgatattttgttcacagctatatgtgatctcctaaacctttgcttcaaaatagtctatttctctgttgtggtttgcttcagggtaaaagccctctgatttcccacaatcaggacagtaatttggtaggttaataagttatgttgtgtgttagtgaaatataagtgctaaggaaaataaaagtagtagggcaagggaaatcaggaatactagggcctggaaaagagcatgaaataatgtgttatgatgagttgcactgagcaggttaaatcagaacgagacaagaagccaactagatagagaagattgttccaggttaagggaatgagtggaaaaaaggctctcaggtgagagtgtgttcaaggaatagcaattaagactgtgactactggccaggcgcagtggctcccacctgtaatcccagcatttttgggaggccgaggcgggcggatcacttgaggtcaggagttcgagaccaacctggccagtatggcgaaaccccaactctactaaacatacaaagattagccgggcgtggtggtgcacatctgtaatcccagctactcaggaggctgaggcaggagaatcccttgaaactgaaggcagaggttgcagtgagccgagatcacgccactgcactccagcctgggcaacagagtgagactccctctcaaaaaaaaaaaaaaaaaaaagactgacttttataaggaagaaagtagtaagagatcataaaatcaagaggatttggtggtacagattagagacttgtacgttttcgtttctgtgcagtagagaaagaacacagagacatttgcaaaacaatttaagaggggattccttcaatacttttctaatatccctctcccaaaggcctgtttattcttcagctaatttttactgataatttgtattttttagaaagaacgcatctctttattttatagtcatgtatcatcaaattatgtagtatataattatattagatcattacatgagcaggaatgggaacaatcacagttgattcttgctatgttccggttatctattgctgagtaacaatttattataaaacttaatagcttaaaacaccagtcactttttatagctcatgattttgtgggtcataaatttgagcgtgggtcaactgggtgattttccactctatgtggtatcaacttgatccctaaatgatactcagctggcagatgagctggtcagcagaatccaagacagctgtactcatatgtatgttgctttggtggagacgacagggagacttgggtcaactagatctattgactctagtacctacatgtggcctcttcagcatggtagacccaggattgttgaacttatcacatgggagctcagggttctagagtgaatgatacaaaagacggaaaatataagtttctggtatcttcaggcctaaccctggaaactagaacagcagctctttcactgcaggggtccccaacccctgggccacacaccggtacccatctgtggcctgtgaggaacccagctgcacagcaggaggcgagcggtgagccagtgaagcttcatctgtatttacagccacttcccattgctggcattactgcctgaaccctgcctcctgtcagatcagcaatggctttagagtctcaggagcacaaccctattgtgaactgcacatgtgagagatctaggtcgcatactctttatgaggagtatcaggcaatctagtgactgatgatgtgtcactgtctcccgtcatgcccagatgggaccgtctagttgcaggaaagaaagctcagggctcccactgattctatgatatggtgagttacataattattttattatataatacaatgtaataataataatagaaataaagtgcatgataaatgaaatagtctccaattatcttaacactatccctcacctcccccccactaaccccagtctgtgggaaaattgtcatccatcaaaccccagtctctggtgccaaaaaggctggggaccactattctactgcattctattagagcagccacagaacccacccaaattcaagggaggaaacaaagactttacctccccagtgaagaaatgtcaaaaaaattcgcagctatctttaatccgccaaagcatacgatttatctctcatagagagatttctagttaaggtttttcagcaggtcatcttgatccatagtaaatctaacaaagggaatggagagctttggttaatctaatgattcagttaaatggagatccattaaaatagattctactataattccattcattatttttcacattttttctaattttttattattcatagtgtttttgtccaatgacctttaaaatcatgaacatttaatatataggaatggcatccatctgaatatggcataattataaatgaatttactttaatatctagaaaacattcttgttcgttctctaacttttagataaaagccatcccttcttttatttaatttaactctactttaaggctttaaaaacctgactgatagggaaaaagtccaaaactgggacgctcgtgtagactatttactgcaataaatcattgtgaaaaatatgggcagtcaagtgctggatattctatttctgtttgaaccctaagaaatatcaaccgtcttctcactggcttttagcacatctgctccatttaaaactatggcagggaggtgtgtaagattgaattgattgtctcttggagtttactgtgcttctttcgaaactttgtttttcagtaaaggcaattgcttcttgagcagtactggttattccacacccactaattatcatgcagccatttagagttgaaatggtaatcaaaccaatgaaagcccaagattagcagcgttccttcttcatttctggtagagagattcatctgaatatctataaaggattttgtggtgcattctctggcagatgcagtaaaacaagtgcaacatgaactttaaaatacagctttgagttttaggttgaattttaagttgaacatatttcaaattttgcaatttaattataggagttaaatgatcttaaaggatcattctaggtctgaatagaattttaagagctagattttattaaagaaaagatatattttaagtgataaaatttatatattttgcccttcagaaattactggttgatgtttctattaaaattattaagatctaaatatacaatgatactcgagaccaattctcatttaaggaatggcatactgtatgacaggatgtgaggtgttaagagataattacatgcctagaaggtgtagtgaatcatatgaccaaaagccaagaacatccagagaccaaaattcacagtcatttcaaatatcattactccctggtgtgtgttattctacttagaaaattgcatgtttgttgtttgtaaatttagagacaaaaaatgcttaaattaattttttcatcatttctaaaaatttgctttaatatttactagcccagtaaaatgtattcaaatcataattataaatatcagggctattgagcaggggaatgtgtcaactgccattccggaccttcttctggaactaattttgattgccagcagaataaaatgcatgcaatgaatacaatgaatgtaatgctaaatcaaataatcaagtgtttatgtttatgtattttgatccccctatacatttaaaataactctgttttattagaagttctgtatttgagataaaatgcacctccctctcatttttcctggtttgtatgtgagaccacagtatttcacagtagatatccagggaaataacagacaaaagaaaggagagcaggaagaatattttaagatttattggccagcggcggtggttcacgcctgtaatcccagcactttgggaggctgaggcgggtggatcacaaggtcaggatgtcgagaccatcctggctgacacggtgaaaccccgtctctactaaaaaataaaaaaattagccaggtgtagtagcacacacctgtagtcccagctactcgggaggctgaggcaggagaatcgcttgaacctgggaggcggaggttgcagtgagcagagattgagccactgcactgcagcctgggtgacagagcaagactcgtctcaaaaagaaaaaaaaaagatttattaatttgtcttcaacaaaatactaactctgcagtgccctcaccttgattccttacttattgaggactaagcctatttttgtggattgaaatgatgttaattatctgcatccaaatacccctcataggggcgactgtgagcacgtccctctactagtaacacaatactcaggtgagagctggcaaacacaggaagactgaaaagcccgacttggaatcctgacttctacattttttaactgtgtagttctgggagtttcttaaactcgtgtgcctcagtttttccatttgcatctgtagaaagattgtaatagaaactaccttctctgttataatgattatatgagctaaagcatgaagaaatataaagcagctaaccctgagttagctctcaagaagtattttattattaacttgttaataccttcaacttataaaaatttaaaaattatgaaattttttaaattatgagatttacataaagttttcagaatagtctaatcaatacagacagaaagtagattagtagggcctggggacgtggagaaaggagagtgattcctaatgagtatggggtttcttttttgggctgacgaaaatgttttatattagaaagtggtaacagttggccaggcgcagtggctcacacctgtaatcccagcactttgggaggccaaggcaggtggatcacgaggttaggagatcaagaccatcctggccaatatggtgaaatcccgtctctactgaaaatatatatttaaaaaaaatgagctgggtgtggtagtgcgcacctgtagtcctagctgctcgggagactgaggcaggagaattgcttgaacccaggaggtggaggttgcagtgagccaagatcgcgccgctgcactccagcctggcgacagagcgagactctgtctcaaaaaaataaataaataaaggaaaaaagaaagtggtgacagttgcataactatgtgaatatactatatatcactgaattgtgcactttaaaagagtgaattttgtggtgtgtgagttatagctcaataaaatgattttaaaaaataaaatgagaaggatgagagaccggtatatttcagaatagtgcacttaaaaaatttgtttacagaacactaattgttcagcatactttctactggacattactgtatatatatatatatttagtattatataaatacattatatgataaccatatctgataaatattatcttactttatagatgatgaaactcagatcttcaatgatggaagtgacttatctattgttgagttgtaattggatcttatatatatttccctgctcccacagagcctacatttctgaaaaagaaattatgtctcttgtgataaataaacaagaaacatatcagataaaagtgttgcattgagaacaaactgagttgagatagtgagtgattgggtagttattccagcttcagtagtaaagagaatctttgctgaagaggcatgtcagctgagatatgactgtctagaggaaccagtcatgtaaaaactgaggaagaaccttccagaaggaaagaatagccagtgctaagacactgaatttcttatattttgtgtttagaaatgctagggttatagttagcaagatagcctggaaggagccttcccatgttttctcatatatgaaataactaacatggaggattattgtgaagttacaaaaatacatgaataacacctagtatagtatctcactcgtggttggtatataaaaaatattgctgttctattaattcctcaatatatagctattctatacaggtcttatgcaaaaaagaaccttagtgaacgtatttcaacttggtaagagttagttacacatgggctgacacaatcataagcatggaaaatagacaatagattgaaagcattaacaatggtagttggaacttcagaaaaacccactctttcttaatctatgatgaaggaaatggtgggttttccagtggtattgaaataaaaggaaactttttagatggtggagtaaggtatgcaaaggtagcgagcgtgtgcatctatggctggagagaaatccaaagacaagatagaatcacccttttgctctctgtgaaaactctgattttcctttcatggactaaggtctacactctccaatcatcttagttgcatacactattaattcatcaatcaagctacgtcatcctttgtgatatgttttgtttttctttcttctttttaattattgtgggtacgtaagagttgtacatatttatgaaatacatgtgatattttgatacaggcatacaatctgtaataatcaaatcaggataattggaatattcattacctcaaacatttatcatttatttgtgttgggaacattccaagtctactcctccagttaatttgaaataaacaattaattattgttaactataatcaccctattgtggtacagaacactagattttattcctactagctaactgtatttttatactcattaaacaagcccctcttcatcaccccctccccactacccttcccagcctctggtaacaatcattccactttctacctccatgagatcaattttttagctcccacatacgcgtgagaacatgcaatatttgtctttctaggttgtgttttgattagacaacctcttatttctaaaatttgcttaaattatttgagtacttgatccttcacattactgccaataaagcaaaccacagttgaaacttgatttttttctaatattttgaatgtatgctgtgtgcaaaggtaacaaagaggaatccatttaacagaaaacagattgctaatatcttcatcatttactttagattccagtctttggatatcagatttttctctggtcttcatatttatttgttttggcatcagattgcattttcttgcttggtttaaaaaaaactgtatttttttccctgtattatcggtgttgatttcctctgttcttattcttcaaattatgcagagaaatgtgtacaaagttaggaggagttaacgctatataaaataaactatctattaatatcattcggttaattttcaaagaggctgtaaatagatcatggatataggcaaataccagatgccacataaaaggaaaacctcaaagacattttttcttttattaaaaccatcaacagtaagaactgtgacagtaggttttgggtttttttattgccaaggttattatcagccctctaccctaaataagggaataaaatgatttctagtttttggacactgtgttatattattctgtaactacaggaacataatataatgctacagtcaaaagaataagcttagaaatcatctaagtttaaatttgtcactcattttctagaaggatgaccttatactatctatttaacctttctaagactcaattgccttataaataaaatgattataataaagacttcataagttgccatgagaaaagtattaagcacagtttctgagataaccaatattgataataatataataatcatcacaaaacattacctttctccttgtaaaaattataacgttaatggttttaaaaatgtaattctagtaccaaagtgaagtttgtattatgttctagttaatatatataaaaatttaaagaaaaactaaaatacatatagctgtgaaaatactcactaaaccaacatagaaaagcatttgttttgctctgtaaatctaaccttgatgattatgataataaaaataatcactgttaggttattttacttgtgattaacttctatttatgtaccctccctctattgatgtttaacaatagttcatagctatgactatttcatttcatatggctgttcctaaaatcatactgaacatctgactccatattcttaagacaacttgggacctctatctcttccctgcaacaatatttgtgagttgacaaacataaaagcctatgctttagcacgcacaagagatgtggaaaggtaccatttaaattagtaccataaattttcctttttatgtttcctaacctcatatttattgaaatgcattaaattaactcagacatctaaggatataacatttaatttacaataatctttatggttacttaattccattaaccttatctttgaaaggcgtcaaattaagaaatacagagcctgtcactttcatttattcgggggaggctgtgaactattcagatgatgtatctttgattgagggaaggaggtgcccaagaattagtcaattacgcaattaaaaaccccaaacctttcctttggtatgtttcacacaaaatctccattgctgtgctagattacactggatgatgaatcactacttgaatcacttcagttttgattattcaaagtaaaaattgaatggttggcattttcaccaatttaaaagcctcgccgggcacagcggctcacgcctgtaatcccagtactttgggaggccaaggcgggtggatcacctgaggtcaggagttccagaccagcctgatcaacatggtgaaaccctttctctactaaaaacgcaaaattagccgagcatggtggcacatgcctgtaatcccagctacttgggaggctgagacaggagaactgcttgaagctgggaggcggaggttgcagtgagcggagattgtgccattgcactccagcctgggcaacaagagtgaaactccatctcaaaaaataaaataaaataaaagccttaactttcattttctcaccagattttagcttgacaaaagctatctttaagggttgcttaggcatttcagtttgaaatgtttatgttcttgctataaaatgtgtggacatgtgtgtccaaatatatacacacaagaaattttaggtactgtcatagtgttgggatcattaagaattgtgttttcatggcgagtaaattaatttcctctgctgtgagtcactttttggtagtgtatgcatggtttaaatgaaactcactgaactgtttttgtggattcactgcttggttgttttactaccctagagagcaattaggtgtatgtggagtgtgttgaacctataaaattttacttgtgtgatgactgcaaagaaaatgaaagtagtgtcatgcaatccatgaaaactctgctgagtttctagctagtctcttaataaagtttacacaattcaaactctccaatcatactgaatatcactgaggctcttaagacttgtgaaaatcagatattttaaatttttaaattgtcatattatgtcgccaatttccatttctactctatatttatagtacttttttgcattttgagtgcacaagtcaacccgtttggccatacatagcaagacatgtattggtgagagcagcaaaaaatatgtaactgctcgtttacaacttttgaccagtagcgaggtcacactgagagtaccgctcaggagaattgagtcaagttttaggctactaaaatttgctgagctctgtgacctagggacatattcctgactccagcaggcctttgaagaaatcacgctggcaacctcacaatagatgaacaagaaaatggatgaacacaaccatattataagaagcagttatcagacgcatgggttctggagccaggctgtttgctgagttcgaatctcagtgctgctatttaatgactgtgaccttaggcaagttgcttaactctgcctctcttaattttggaaattaggaaaagaactacttacattttaggtttgttggaaagatttatatcacttaaaatgtatacagcatgtaacaattattgaattatacttaacaattattatctaggggaaaatatactgatgattttgtatattgtatatatatacacacacgtatatatcagtaactttaaatggggaagtcactaaaaaaatcataacttggtgtaaatatacttaatctgtatgccacggctagttttttgtttgtttatttttgccaagtttctttaatttctgttggccttttggggtcaccccattagcatctgcaggatagcttacttatacaggggaaagtgtctgttaccagtacagtacagtggtggtataaggaaaatctattaaatgaagtcctgggtgtttatccctataattgcataaatgtatgtttctcaggagtagtgttgtgtaagtaaatggataaaagtcatagagtgctaaagctaaatggaaacaaagttatttagtccaattcccatattttatagatgagaaaactgagaatcagaaaatggagggatttgttcaaggtcatagtagttattgtctgagatgaggaaaatatccaaatgtctgcttaaatactgagatatgcttaagttagcgttgaaaatattccatttaaaatagcaatattttcttcctcctgaacatctttgtactatttagaaaaacctagaaagcatgctggaaaactatccctttttcccttgtcaacctccaattaacacaaaagcccaaactgtacactgtcccttataaaaacaacctaaaattttgagaataacattcataatcttaaaagaaaattacctacttactacatatgctggcaatgtacttgctgggcaatcccacttgaaattcatagaaattaaacagcatttcagaacatcattccaacacctaattaatgacagggagtgactgctgactaaagaatgtgtccatgatactttcaatttatagcaaaaactcttaactattgatagcagaaatgtgatatataaggatcttgttctgtcctttcaaaagtcaaacagaaccactgtcccttaaagctgatcggcaaaggaagaagctgggagtccaaaggatttatttatacaaaatatgtatttccctaatgttcactttccaactttgattagacattttttttttttttttttttttttttttagcgatggggctgtattagtcaattctcacactgccataaagaaatacgcaagatgaggtaatttttaaagaaaagagtaattggctcaaagttccataggctgtacaggaagcataatgctggcatcttctcggcttctgggaaagcctcaggaagctcaaaatcatggtggaaatgaagggggagcaagcatgtcatgtggccagggcaggaacatgagagagagagtgggaggtgtcaaacacttttaagcaaccgtatctcatgagaatacactcaccatctgaagacagcaccaatgggatgatgataaaccactcgtgagaaatccacccgcatgctccgatcacctcccaccaggccccaccttcaacactgggaataacttaaccgggcgtgatggcaggtgcctgtaatctcagctacttgggagacagacgttgcagtgagctgagatcgttccactgcactccagcctgggtgacaagagtgaaattccgtctcaaaaacaaacaaacaaacattggggattacatttcaatatgagattatggcagggacaaatattcaaactatatcaggggtctcgctctgtctcccaggcttcagtggcaccatcgtaactcactgcagcctggaactcctgtattccggcgatcctcccacctcagcttccccagtagctaggactacagttgcgccaccacatctggctcatttttgtagaaatggggtctccttatgttgcctgctttggtctcaaactcctggccttaagtgatccgcccatctcggcctctcggagtgctgggattacagacgtgagtcactttgccctcccggactggttttatgtgtgaaggaggctgctgctgatttcatgagtaagctggagaaacacattaaggaatgatactgtccccttagttgtcaaccttcaaaataggaaacaaataatagcaaagaggtaaacgtggcagaaagcaggggtgagaaagggaacaatcagatatgcgaaacatcaaagaacaagaaatagcaacaaacccacgccagaagccagcaagaaaaggagaactgttataagtaccagtaaaaatgctgaagaatggcaataaaaaggagaaaaaagtactcacaagggaggccttgaaatgacaataatctattccaggatgaaaagaaaaggaaacactactccaaggcaaaaagaaaataaaaagtaaggaaaatcaagatagatgaatatcttcaaaaaatcagcacaatggagatagagtgtttagggaataagaaaaaaaataaaagtagacagatacagaaagaagtagcaaatgcaaggagcaatatccctattattaatgctggcaaattgtacttatatctctttccagctatatagcatgttcctgggaaatagcctaaagcactgagaattagggataggagaatgctgttactgtgagaatacgaattaagtaatgccagagaaaggctttgctgccaatataatagctgagtgatcaggccacgtcatttctgtctgatgtttcttcctgtcgaataggtaatagtattatttctctaactcaagggacattaaaaaaatattcagttaatgtatatataaatggagacaatatagacagatgtttaagaatattttggttaaaaggacagactcaaagccaaactttctgggttggaaatccaactctttcattttctctcagtactgtactgtaggactctctttttatacactttttttgtactgtcttttttatacactgactctcttttttccttagtttcttcatctgaaaaatagagttaataatagcacctacctcataggattgctgagatgagaaaattaacaaataaaaatcacttagaccagtacctatcacatagcaaggaaaatctcaactatattcattgtggtgatgttttgttaataaacttttaatatgaatgtaacatatcacattcattaatatataggaattatatttacttacattgataaaagtcctatctgacatcatcttctgttccttcattatttttcccttcttcctcactttttcagttctgtctctcttggttcattccaaaaaagggtcatttcttttttgcctcaactgcagaatgcatattatttatcaagcaattattgagcacttaccatatacaggcactgttagaaagacatctaaggcacaattttttagtgtgctgaaatagttattcattcagcaaaagaaggagctcataaaaataaaaaagaaatgctatgggtaaatataagaacatggtgatttcacttggtcctcttggatgtaaaaggaagctttaccaaaaatgttaaaataataattgatggttgcagtgctgctgaattacatcaaactttctattgtctcacatttcactttctaatttgtccgttcctagtgaaactagaagctgaaaccacatttttactcatttctcccgttatcctccccccaccactataaaaagagaacatttatgcttaagtgcttctgatgatgtgttctcagtatctcattctgttagactaatagtcctcatgccaagttaaagtggttggaaatcctagcacaccttgcctaagtgtgttttatttatcttgctacaccccgttttattgtaatagtcttgggagagccccgaaagatggcattgacctatttctataaactttaagggagcaggggacgatctccctccataacaaattccaataaatgatgaggttaaaaattatagaaaggatatttctagagaggtatttttatgtgataaattttaatatatatgtatatagtttttaaacttgaatatataaaatatatactaaacttgtatatttatatatgtattaaacttgtaccacttaaaaattcttctgtagaaatatcttttctataatttttaacctcatcatatataatgatggtaattcttcgtacttcttactcctaattgtcttagttcaattgggctgctataataaaaatatcatagactgtgtaatttataaacaacgaagatttattgctgcagaactgtttctgcagcccaggaaatccaagatcaaaatgttggcagatttggtgtctggtgagggttctgtctgcttcacagatggtgccttcttcctttaccctcacatactggaagggcaaacaagttcccttggcctcttttataagggcactaatcccattcatgagggctccgcttatatgacctaatcaccttcttaaaaccctacctcttaatactgtggcattggggattatgtttctacatatgaattttggagggacacaaatattcaacccatagcactaatgaaatacagcatttttagagagcaatgtctactattttacaggcagcttgctactcgtgatgacaatacttcttcgatctagtatcccagcattgttccattaacaatgtatgcatcttaccaatgtaatgttcagtaaatattttgcatattttaagaggaatctgttgtggttttttttttttttttttttttttttttgagacggggtctcactctgccacccaggctgaagtgcattggcttaatcacagctcactgcagccttgccctcccagaccacaggtgcgtgccaccacgcctggctgatttaaaaaagaaattatttgtagagacaaggtctcactacgttgctcaggctggtcttgaacttctgggctcaaccacccctctggccttggccttccaaagtgctgggattacaggcatgagccaccaaacccagcctgattttttataatacaaaataatatacactcactgccaaaagtagaatacagaaaaacacaataaaggtaatagttgcctataattttgctattcaggaataaccagtgttacctgtttggcacagacattcctattgagaactatataatgatagctaatatttactagcacttggtacatacccatgtttcaattaccttatatgttaaatattatccatttatgcctgaaaataattttataatataagtactgttattagaccattttaaaaatgtgaaaattggtgcaataacaagatgcattaacttgttcagggtcacaatgccattataaaatggagccggaattctaaaccaggcattcaggctccagagcctaggtttttaaccactaagaataatacattttagtattttagcatacacatagttttggaagctgcttaattcacttaatatatcatatggttttccaacgtagttaaatattccataagaatgtgatttttttatgtctgcatataaatatattaataggatgtaccagaattgttttcatttctatttcatgaatatttagtttgcttctaatttttcacaatagaaatgatctagcatattttataaaatttttgagcagatgtacaagtatttagagactagtatttgtttaaataacacgtgttggacgttagtggggtatatatcaatgtgaaacatgaagtagatgtttgctttgtggtaactatgttccaggaacagtgctaggaagcactagggactggaaagctgtaaaaaagccagtctttctgttcttaaatatcttataatctaatggagagagaaacctgtagaatagtgcgtttcagtagaagcaagcttagtgtactgagaaatgaaaggcagatgatgaagtttggacaatggatggaaactatcttatcaagagttggggttataagaatgacagtaggtgatatgaagaaactagtgttttaagaagatatatgtggcagcattatagacatatggggatttagaacaggattatacctactgaactggacttattttatttctagaaattttgtgataataaataccatacattatatgttgttctcatataggagacgtaatatatgggtatgccattaatcaaaggctgattttaagtggaagaattcgttctgttggtttacagtcccagttataaattaatgggcttaccacgtagttgttcccagatcttggaagtattgaagttttttaaaaattaattaatttatttttaactgacaaataatagttgtacatatttaccgagtacaacgtgatgtttttgatctatgtgtatgttgtagaaagagtcagtcgagctgactaacatatctatcacctcaccaacttatcattttttgtagcgagaacattaaaaaatctattcttttagcaattttgaaacctataatacattatttttaactgtggtcactgtgaggtgttgaatgttttaggaaattctcagataatctcagggccaagtgttaagcagatcattctctgagactggatcttctgcagtatgtctgcgaacttttttatttcactctaagcctttgttgttgccttcaggggttactgactcacgtttaactcaaggctgactgagttagatatataccgcctatagttgatgggttttgttgccagaaatattcttttgcttatcagtggggaaggtttttgcttctactgctggatttaaaggtgtccctcaagattccattactcagttcattgagaaaagcttaaagctaacggaggggagttctgagctctgtttgatgaaggaggctgggtaaaataatagctcccaagttggctcaagttcttccagatgttcatgtttatgtaaaacttaacacttagagatattccatgttgtaagatgtctgtgcaaaagttccttatatcaaattctaaaatgatttttggtcatcaggtgcaaaaattaacactaatcatctaaaataaccaaccagatagattttcattctgtttgacttttgaaagcaaatacccctatgatattgagtgagtgttttattgtttgattttccttcaaacttgctgtaaccctatgggaaagatatgcaatcaaaataaaagaacagtatccaaaaataaatgggtcatgaagaattgtgcttaaaatcgttaagtaaacagacacacaccacagtgatgagattgtagaaactggaaaaaatgctgccagctgaagagctgcaaagagtttggcttttcatgaacttagttactgaaatgaaagttcctccctaggagagaagccaaaatcatagcacggtttgaataaaagtacacctttccaaagttactgcagaacaattatggccgggatcctttactcttattgagaaagctcggtaacctcttattttaaattgacttccattgagcaataatgcctccctgcttgcactgtaaggtactttattgggtaatgtgtttacaagctggtctcatttttctttttgtaataggagatgggtagcttactgctatttggaggtgactccaggaaacatgattttcaagatggtcattttaaaaaattgtgattattgggaataataactctagagacaagatttaatggacttacttccaatttattcagtatgtcaccaggttattgcagttctagttttaaatctgtacattcgaagtctacgttgttccctgatgtactgtatatttaggtttgtactactacatataggtgctaggtttagctccaactctcagcaggagcctaacctctcagaacaattattgtagccagatctttggtggccctactacttgctttttttttaaccactactatttctttaaaatcaaagatatggcaaacatattactaaaaggaagaaaacccatcttcaacaacattatggtgtttttcacttcaaaggcttattttgtatgcatcatttgatttaatttcctccaaagccttgggaaatgtgagtgattatcatcttattattgttgttgataaatagtagctactatttatttagcactaactctgtatctggaactgtggtaaacaccttgtagtggaaactaacaatagcctcaggaggctggaattgatattatccccattttacagacaacgaaatgtgatataaataacataacgtgccaagattatgcagctagtacataggagaactggaattcaagccctagttaaattgctttgacttcggagcctgagtgttgattgtctatggcatgttgccaagctattttatagctggaaagcctggtgatgctaaaagtttaaataccttgccctaggtcataaaattagttcccaatgccttccaactgaaatcccaaacattttttattacactttgttgtccgcaggactgctacccgcttatatggtactctttgaaaattaaacaaagaggcatcctccccacttcccaaatccacagaatagccaattttgaaagaaagcacgcttttttttcagtatgactctgctttattggaggatcacagggatggctggggggaatgtgggtatgatactcaagcacctttgtgcaaggtgcaatgcccagagccataaggagtggccccagttgtgctcatttaaaggaatagttggacaattctagataatattaagggagatatccaaaagagtttcctataagtatgtgctcttaagagctgtaaggaagtaaaattttgaccccattagttacatttctaacatgatctaacatcttcccttcactgccaacgaaaatgtttaagaagatataatctgacagcagttatgctaaaactcccctgaagccaaaatgtgtcacttctcaaaatgaccctcatcttcacaagcccttgaagaggagttgaggattatttatgaactaggttttaacctaaggtgatacattgtgctgcagttgttactgagcttagggatcattttgtctattcatttcaggttaccattaggttctttttcaaaatcaattccttttaattatacagctaccctgggcatatattaaatgtcttacaacattgatacgctttcccctgaagtactgacaaagtaatagatttaatgcgcaaccacaggcataaaaacccacacacagtgtaagcatacaatgagtacactgatactcacaaaagaggtttaaaaaaatgtctgtaactggggatgtggtggtgtgagggccccatgaatttttagcttggaggatatcttatcgtaccgatgaaccctgaggatatgcatgaaaacaagctcctactcacaactttttttgcctgaatggtaagtttgtctgcagggcttggtctgattgatttgaaggagcatggtctagaaagtggttctcaaactgttggataacagaatcacctggggggtctacctaaatgtgcaaaggcctaagtcttatcactgctttaatgaatgtaggtctctgggtttataatgagctcgtcagttgattctgatgagcacctaatttgataacaacatgtcaatgggtacagattctcaaacttggctgttcattagaattgcttgagtctcatttctagagactctgatttcattgatatgaagtgcagtttgggcactgggtttttttcttaaagaagttcttcaggggattctaatatcagcaaagttggagaaccacgggtctaggggcctcgctacccgatgtgttgtccaaagaccaccagcagcagcagcagccgcagcagccccagggaacttattggaaatgcagaatctcaggtcccacctaaaattaccgaatcagaacccgtattttaccaagatacccaggtggtttgtatgcccattaactcttgacacacacttgtttagggagtcaggtagagctggattcttaagcacttccggttagttggatgactgaaaaacctctctgagctccaatctcctcacctgtaaaacgagtttaaggaataacattaccaatattgcaggtttgctgagaagattcttgaatgcaatacctgaaactcagtttaattcctagaacagtgaaaagcctcattaaatatgaagtcccggccaggcgctgtggctcacgcctgtaatcccagcactttgggaggccgaggcaggcggatcacctgaggtcgggagtccgagaccagcctgaccaacatggagaaaccccgtctctactaaaaatacaaaattagctgggcgtggtggcgcatggtagtcccagctgctccggaggctgaggcaggagaatcgcttgaacccgggaggcagaggttgcggtgagccgagatcacgccattgcactccaacctgggcaacaagagcaaaactccgtcatatatatatatatttatatatatatatagtccctactagaagagagtccctgtgaacctttttttacactagtggccccagagctaatgaggccaagccccaccaatgatcgtcgtcacagacattcctgtttttctgatatttataaaggttccttttaggtatgaggtgatttttattcaaaagaacaaatgttcccagatgccaagtgtcttccgctaaaaggataaatgatcagaaagcaatccttagctacagtgtccttgaaggtgcattgtggaatcttgcactgttgtgcaattgtgaacaacttcatcagacagtactgcgtatttgtactgtgttatccttaatttttccctttagatcttaatttgttatttatttcttccctggccaagagctaatttctttacagaaactcatatatagggttccttttttcctcctcaagtcagtaacttctgcaattaactacttttttcttaatttctctaactttggcccaactaaatattttcccatcattcctgttttgccgccctcgagctaggacatggaacttacttgttcggaaaagcttctatctgattgaaagggcatgctaattctttctttatagtgtaattgtttcacatttaagagggaaggagaaacgcctaaagtaataccacagaagaaataccctcaactaatctttctaagcagtacgacaatgagtaatgattacagttaattaagttaggcaacctccatttccattcacttagtagcactgctaattatactcatgctacaaggtttctttagttcttctgtaatttggatgcagtactctttgtagacaagggaatacggtacgattaatgagatttttcccaccaacacctcctgttctctccaaatgaaatttccgcatctgaaaattgagagtagggaacggagaaaaaaaaaatcagtcacattttaacttactgccagcacggtccatgcttataattgccaaatattttatattaaagaaaacaaggtgtgggtttttttttttgtttgaaaccttgtaaaattgtggcttacgtaaaaatgaaataagtatagaacatggctttttaaaaatatcagtggcaatgataatgacactttatattgtatgcttttggtcgcattaaataaacatatgttgagcacatactgtttgccgggcactggatctactaaaaaaaaaaaaaaaaaaaaaaaaaaaaaaagcaaaccttaactgtaactctggatttcttttacatgaacttcaatcattttaacaacttactctaaagaaaaccaagaactgcagctctacttggttatattgttaatgaagtccttggaaaaatttagtttatatgctttgatcagatggggattgacatacttaagagttttatttttaatctgaaaatccacttcaatcttatgctctgggtaaacagtcattacagaagcctgacacaattctgttttttcaagaagcaggattcaaggtttaacttcaaatacaaatttgagtaagttatacggattattccttttaattctttttttaaaacacagggtttatgtggatgaagtttcgttcttaatctccatttgccttaagaattaacttctgcattgtggtttagattgagtttaagattgtttcagattttaaaatgtatttttaaaggtgtgtctggaggaagatatttgtatgtcaagcactgttggttttcataggaagttcaaatgtgttttcagcagcactggacgtttttagagttattttcttctcctagcatcacacaggtgcgcaactttataggtccagtctcttctttttgcttccttctctgcttctttttctttttcactaacaccagtttgcataaatgagtgcactgtcgagttcacgtgaataccagacaaaaatacaggtgtcttcataataatcagctcctctaagtctactttccagtttctgcttcagactcagataaatcctatataaagcagacgacacagttatttctagaggaactgaggttactgattagaagggaacgtaatcaggtagattgagccggtgagggaagaaaccattgctgtgagaggggagtgtttgcaaaatgctgtctgtgaagctgaatctgtgagaacacctcactattcacggcaaccggagtggaagaaacaggtgcaaaaagattgtgtgtttgtctgcttttgtgaggctggtcagagattctgtgcctgctttatctgtgcttggctatgactctacctccaggtttaccataccccatagaatgtgtaagagaaaagtaccaacagggaaatcagcaaaaagctttcctatgaaggtgtgtagccagcctccgcagaatttgaaatgtctgaggtctcatctggtgagtaaaagctgcagataaatgcaacagccattcagaagaatgataaattccacaagcattcagaagcaggcttccctaaaggtgactcttttggtcaatttgcaacccctgggatatatttggatgactcctgttccatatgcctttctataaaagttaaattggggcttttgttgtgaggaagggaagaaaggggtttgacaccaataacctataggataatgcaaatcactgaaataagaaggaacccatattctactttttgggttgtggctttaatgaactttgtcttcaggtatctaaaattatttctagtatgaagaaaagaaaaaaatatccagaccttaatctataaacgataatatttttacctcaaattaaatttctaaggacgtagactacattcataaactcattagaaaactaatgagggatttttatattaacaatagaaaaacctgtgtttcacatatatatatgggcttatttatgcatatatgtacatatgaatatgtgtatgtgtatatatatacatacacatatacactcacatttttaagaagtttttaatcaaagaagacggaaataacaaggatccttgtgaatagtaatttagacatgtttagacaagcacaacttattaggaagcaaactgggacaattgtaaacagtaattccaggctgcctaattatctgaaatatctcagaatgattttagaggttaaacacttattattaaatggtagcttctaaataaagtgaaaaggtgtagtgatttatcaggtttttttttaattatagaatatcctaaaattctaaattagcatatattctgttgccaatatatactgtcagtatatttgaagtatattaatttctaaattatgttacttttattaaaattccaaagagtttctgacttggacaagttttctctatctttaggaagacagctagtttttttttcaggggggtgagctaaaagagttaggataaagtacaccgcattaaattaaaaacgtgtgttgggaataaagacaatccaaagttaaaagtctatttggatctcaaattttcccataacttgatttgtaagaaaagttacccttttgcaagtcttctctctcatttggtctggactaagtggttgtcatttctcacttacagattgctgttttactaatctctttataaatatattttttaattttatatctgtattttattcatcagattgtcctggaagtacagaggccagttgatggtttatgagttcaagctgagccgaatatagctaagccctgtcttgcctgacatttcatcaaaagctgtgttgatttgcaatgtttaccgacctatttattgaaccttcacagcttgaactatgccaccaagctcgctgacattgctgagattatctctaaatgcatgtacaaactaaggaggaaattgaaaaataagttaaaaacaatcatccgtctatttattaaattatgcttatagagtccttgatttatgtatttgtttgattgttctccgcaaagccccatgacctgatttttctttgatcttcccacacactcttggaagacgatagattagaacagtggttctcactcttccttgagtgggcatcagattcacctggagggctggttaaaccacagcttgctggatgccacccccagagtttctgattcagtccttctgaagtggggccccaacctctgcatttttaacagattttttaggagatgctgatgctgctagattactaagaacagaaaatgagtgttctaatacaaagagcagaaaataattgttcttaatctagttacctgtgttctctttatgcgttgtttagtttacactgtacaagaaaataaacacatatcctcacaaaattgaagcatatattctactaaagattaatatattaaaatattgaataaaatattaaatatctatgttaggaaattgtattcctgctgaaactggcagtaaaattacttaaattacttagcagtaaaattactgttgacaaaagtaaacaattggtcattaggtctcaaatacgtaaaacctcaattttttttttttttcttgagacggagtctcgctctgtcacccaggctagagtgcaatggcacgatctcgggtcactgcaacctccacctcccatgttcaagtgattctcctgcctcagcctcccaaaaccctcaatttttaattactcctttgattcttattctctgcgatttctccctatgtaaagttttagtctattatatttttagtaaaatgaaagcatgatccatgagataagcacttgaatctatactatacatcaaagtctccccttttgggccattaaaactaagatgttttccaacttaccttaccaaagccacagtttgaaaactgaaactatgaaaaaactggatattttgcttaattataatgcttcgtaaaaaattagaacgtctttaaaaatgttaacaactaaagtcaaacattcaaaaattataacctttgctataaagttatatgttcattcattgtagtcactttcttttagtaaaatgtaagcttttgatgtattctaatggggcgcaacgtttagattaaatgtttaatatggataattgacttttaatgaaatttaatctagatgttcgtaactgagagttaggggtgaacatgcctttaaggatgtagacatttttattacaattattttctccatgtttttgattaaacatatcaaggaaatatatattattttttatttaacttttctaatgtattaatttttggccagtcctacctatcacatgcttcagcaataatcagagctttgatgacaatgtcacattattttaattcagatgttattccagtttgataagatggagctgatctttagaaaacaagtgtaccatatttctaatctttaaatattatattgaattatttcagcctggctcacttgccagtttttcccttttgttttcatgattaaagcaactgataattattaacatagataagatttatgacattaatttatggttttcttcataaaaataaagccttttttttttttttttttttttttttagatggactttcgctcttgttgcccaggctggagtgcaatggcgagatttaggctcaccgcaacctccgcctcttgggttcaagcaattctcctgcctcagcctcccgagtagctgggattacaggcatgcaccaccacaccaagctaattttgtatttttaggagagacggagtttctccatgttggtcaggctggtctcgaactcctgacctcaggtgagccacctgcctctgcctcccaaagtgctgggattacaggcgtgagccaccgcacccagccaataaatccattcttaacggaattttagagcataaatctgagaaaagaaactaaggctgtacgtactaggtctcctatacaccttgtctttcatcattgaatccttagtagttaatacctgcttggaatgtaatgggaattcaataaattaattaaataaatggatgagtgaatcctacagacaattttgccaaggaagaaaataaagacagggtatttttatttctttcggttttttttttttttttttttttttttttttttttcagacagagtctccctctattcgcccaggctggagtgcagtggcacgatctcggctcactgcaacctccgcccttcaggttcaagtgattctcctgcgtcagcctcccgaatagctgggactacaggcgcctgccaccacgcccagctaatgtttgtatttttagtagagccgaggtttcaccatgttggccaggcttgtttctaactcctgacctcgtgattcgcatgccttggcctcccaaagtgctggggttacaggcgtgagccaccgtgcctggccagggtatttttatttttattttatttttttgagacagcgtctccctctgtcgcccaggctgaagtgcaatggcactatctgggctcactgcaacctccgcctcctgggttcaagcaattcttctgcctcagcctcccaagtaactgggatataagcattcgccactacgcccagctaatttttttgtatttttattagagacagggtttcaccatgttggccaagctggtctctaactcctgtcctcaagtgatccgcccacctcggcctcccaaagtgttgggattataggagtgactcacaacgcccagccttttatttcaatttttactgctgtttgttttcttccaaatgaataataaatatgacattttattctgatagctattagattatgaattgaatgtgagaacaaaaggcattctggttttcgtttgttttaatattggactgaaaaaaaaaaaaaaaaactcatttgaaccgggcgtggtggctcatacctgtaatcccagcaatttgggaggctgaggtgtacagatcacttgaggtcaggagtttgagaccagcctggccaacatggcgaaaccctgtctctcctaaaaatacaaaaattagccaggttgtggtggcaggttcctgaaatcccagctactcgggaggctgaggcaggagaattgcttgaacccgggaggcggaggttgcattgaaccgagatcgcacccctgcactccagcctgggcgacagaggtagattctgtctcaaaaaaaaacaaaagaaagtagaacaaaaactcatttgagactttcaggatacaataatttgtttaccttttcagttttctgattcctcatggtgaaggaatcatatctcttcagtgacacacaaacacacacaggatatatacagttatgtgttaacaccagggatacattctgatcaatccatactaaggtaatttcatcgttgtgtgaatgtcacagagtgtacttacactaacctacgtggtatagcgtagtgcagacctaggttgtatggtatatcctatttctgtttggctacaaacctgtacagcatgtgactgtactgaatactgtaggcaactgtagcacaatggtaaatatttcaatgtctaaaacatatctaaccattagaaggtacagtaaaaatcccgtgttataatcaaatgggaccactgcggtatatgcagtttatcattgactgaaacatccttatgcagttcctatcttttcttttgggccacacttggaattgaaatggaagctggagaaaggaagaacatgaaataaactgatgtttttccagccagtcaaaactcagcctctgtgttttagagaaagcattcggaacacagttgagagagggagagaaagagaagtggaaggtttagagggaggtccccgcttgtttttatctcttcaagcagctctaaatttgtccaaagcagaaaaagttgtacttcgcttcactctatattcaagactcaaaccaagattaaacatgaacctgtgggaaagttctttttaattaaactcatgttatttgaaaatacattatggtaagatatttttttgaaagttaagagtcagattttgtctgcataatgaaaagtgactaaggagtgctgaagttatcactcaattatcaggaaatctagaaaaattactttccaataaaaatgagcatcaatgatttctaccacagccttttggttaaagagtaatgaggagaaattctgccatgtaattaaagataatgaaattatcaatcaaggctaagctgcattaggttctttgactaaaataattttatacaattttaagtataaattaagttaaaatatatacattgagtgtgtgcattaatgtagacagtgccaaatattcaacaaaattatttcaccacctttgatttttgttttttgttttttgtttgtttgtttgtttgtttttgagacggagtctcactctgtcacccaggctggagctcactggtgcaatctcggctccctgcaacctccacctccaggctcaagcaattctcctgcctgagcctcctcagtaactgggattacaggcatgcaccaccgtgcctgactaatttttatatttttaggagagacggggtttcaccctgttggccaggctggtctcgaactcctgacctcaagtgatctgcccatctcggcctcccaaagtgttgagattacaggcatgaaccaccatggccggctgatttaagcacctttggaatcataattattaatcataaatgaaaccaaactaaaaataaagtataccacatgtgagaacattccaatgaataaaatcatttctgtgtgagctagcctgctgttcaaatttgtttatgcttatgcttcagataatgtttacaaaagtactgacagattcctagaagcacaatttctaaacacttaccttggaggtttctagggccctaaaaatatttctagtcatttcaaaaaaccacaaaacaactacaaaaaatgtacttctcccaaaggccatacgtagcacatgcaaaaagagattctgcagagcattttggaacgtaagtagcttttgtggttctgtgtctcaaattagcctgttcttaaaagtctgcaaattaaaaaagaatgataggccaggcgtggtggctcacgcctgtaatcccaacattttgagaggccaaggtgggcggattacttgaggtcaggatgtcgagacctgcctggccaacatggtgaaaccccgtctctaccaaaaatacaaaaaaattaaccagacatggtggcatgcgcctgtagtcccagctactagggaggctgaggcaggagaatcacttgaacctgggaggcggaggtttcggtgagccaagatagtgccactgcactccagcctgagagacagaggaagactccgtctcaataaaaaaaaaaaaaagaatgataaattgagtcaaaattataaaaattcaacagacgctggcacagatttgagatttgaggaaccagtaaaaaacgtagtacatattgataaatggcaatgtggtgtcaagatattaaaattggttttaatcttattaaccaacataaaatatggaaaacttatacatttaagtgggcccagaaaaaagtttgcaaatagcattccaaaaatcgatagaataatgtgaatgctttgttttctaatcttcacataatagggttggactagatgatttataagatccagtatatagcccctaataataacccctttaaaaagtctttttttttttttttttttttttttttgagagagtcatgctctgtcacccaggctggagtgcagtggcacgatctcagctcactgcaacctccgcctccctgtttcaagcgattctcctgcctcagcctcccgagtagctgggattataggcacacgccaccacacctggctaatttttgtatttttagtagagacggggtttcgccacgttggccaggctggtcttgaactcctgacctcaggtgatccgcctgcctcggcctcccaaagtgctgggattacaggcgtgagccactgtgcctggcctaaaaagtgtttcaatagaggagagaaataaacaagatcctgaagggataagaagatgtaaaagttgttgctgatgttctgccgcatatttctttccccacccgagttccatgcagtatcttgctttgctataaacaggagtaagccagaaatatgaggggttgtgttaatgtcaccagaagcgacctttaactacgaggggatggaagtacttgaaaaaagcacgcagccatctcatcttctggtgcataattctgaggcatgttcctcacagcttctcagagattcaccagcaggactgagccccagaataatgtgctcattgacacacctttgattgcctccttacctttcctaatctcactttctctttcctctcacttgtactttttgtaatcaattgccagataaactgtgtacctgcacctcaaatccttgcctcagtgtctgtctggggagaatctaaagtaacacagaaggttagcgagaaattgtttcacatgcttaaacaaaacagggcaaaggcacttaagatgttagagggagggagggtgaggaaactcacacgggatgacttcactctgtttagtacctaaaagtgaacaggaggtggatcgaaaggaaacagttagtgaacctgcaaatcaataggaagggttagaagactggttatgggagatggaccagatagcccagtaagtgaagaaaaggctcatggaacagcagagaaaatggacatatatcatccatatattttgtttccatcctagtctaatttacccttagatactacaataatcccccaactcatctttgccacttgtgcttttgtccttttctactcactccatactctacatggcctaaaggttgagcttttaaaaacataaaccaggttgtgtcaatctctgattaaaattcgttactgctctgatgcgtccaatatctttaccaagaaccacacttcatttttcttccttttcttctgcagtcttgctgcatttcagccatactgacctgctgccatttctcaaatgccagtctctgtactgctattgcctcttcctggaatgctctcctcatccatcctctaactgccttgatcgccactgaatatacactaacatgcatattgtcagtcacgcagtagtagcttaatatgtatttgcggaataaactaatgggaaagagtaacagcatggttcagttgatggtggataatagtgatttactgagtcacaaacaacatcatctgatgccttagcaaagaggagtaggtattggagaaagaagacaatacttacaattctttacttccttgagctcattttatatgtgtgtgtgtgtatatatatatataaaacatatatatgacatatatgacatatttttgacatatgtcatgttatatgcctccttctctattatatatacaatgtgttcaaggaagtaaagatgttcaataaagttcaaggaagtaaagtctaaggtgtctttgtatgtagcactgaagtgatcagtcagagtccaggcttggctggatatcgaacagtggatgtgtgaagtagaagtgagtgatgccaattttaaagataatgagcagtttagtaggcaaggatttagtgtcagatatggaggttgtggttggcagtagtagtagttgtactgggaagctcttccacagtggtgaagaagcatgctgagaaaggccaaaaagtcaaagtagcatcttgctgtggataaggagattggcataaatggagtaaaagttgagggtgaaaagtgatgtgagacaaggacaaatagacaagttggcttggctaatgtaatacccatgatgtaagaaaagctatgctgagatagctaggctaattccaagggacttttgaggggagcatatcaggttatcacatgccaaaaatgtttcatttcagagactttagtcttctcattaattttatcgctaatccattcattttcaaaatgtatttcaggatttcacatcaggtcgactttaaatcttttgttcagatgaacgtttcttttcctaggactgagtaagacagtttgtcctatccagtgcttaagagtaaagcaagcttatgttgccactgcaggcaggattattaaataaccaattactattcagactgtgtcacatccctttaaattactcaagcaagagtcttggccgggcgcggtggctcacgcctgtaatcccagcactttgggaggccgaggcgggcggatcacgaggtcaggagatcgagaccatcctggctaacacggtgaaaccccgtctccactaaaaatacaaaaaattagccgggcgtggtagcgggcgcctgtagtcccagctactcgggaggctgaggcaggagaatggcgtgaacccgggaggcggagcttgcagtgagccgagatcgcgccactgcactccagcctgggcgacagagcgagactccgtctcaaaaaaaaaaaaaaaagagtcttgaacttgttcagcctgaacacatctgatatcctcagccaagtataggatgtaaattagatagcttctggctttactagtgtggaatcaggcatgctttttccccttaggactccatgactaatgacctgaattgtctacatttcaagactagtcagatctctaatggtgaacctatttcattgtttctgcttctgttttgtcccgtagtatatgagacaaaggatatttttatgtgcaaattgcaacaagttgagatactcctttaaaaatggattttctttccatagttgattagcgtatggtaccagatttcctagaaatgtttttatgataaaagtttcaggttctcgatgatgcaaggaaattacagacgttaggtaatgatttgtaatcaggacacatgagaggagttgtaactttactgcttaccctgtggctttgagaatcattaatcctcaatgggcctcagttttcatatctaaaaatactgctttttaggttcagttacttcaagggtcaaatgagataaaatatatgtgttataacaataaaatgtaataataaatatgaggtaccttttcccccagctttattgaggtataattgacaaatggcgattgggtatattcaaggtgtacaatatgatgatttgatacatatacattctgaaatgattatcacaatcaagttaattaatatatccttcacctcacatagttgccattataattttttatgatgagaacacttaagatctctcttagcaaatttcaagtaacaatagagtactattaactatagtcaacatgctgtacattagatccccagagcttactcatcttataactgagagtttctatccttcgaccagcatttccccatttttttccatccccagttactggctaccactgttccactttgctttgatgagcttaacttctttagataaaatgagttactttttgaaaaacaagtttaattggcaaaattgtatatatgtattgtgtacattatgttaaaaaatatatatatatataatgtggcctggtgaaattgagctataatagtagtgtttttaatgactatgtagccgaaagttccaaggctttcagctgattgactatgtaattcttaaatctagtagagtatcttctgatttgagagcagtatgaatcctggcagaaaactatgctggctatacacttttaagggtttgaactgtgttactttatctatatactctgcataaaatattctctctcctatacaggccagctcatttattcttgcttttctagtctgattccccctttctggaatctttttcctccatcgacttttggttctaaagcattcccatcttcaaaaattcaattcaagtcctagttaccacaacactttctctaacggcttgaaacacctcttttttctatgaacttttgttccacatagttatttctacccagttatcgacataattgcttgctaattatttcctgtggattaactttgattccataactttttaacttttttatagatttcctgagagcacgtgctgtgctttatatttctttgtaaatacctcagtagctctgcattttttttctctgtcatccaggatggagtgcagtggtcgatcatggctgactgaacccttgacctcctgagttcaagtgatcctcccacctcagcctcccgagtagctgggactaccagcgctccaccacacccagctaattttcgtactttttgtagagatggggttttgccttatcactcaggctgatctcaaactcccgagctcaggtgacccacctgcctcagcttcccaaagtgctgggattacaggtgtgagccactgtgcccggccagccctgtggttttttgtcgttgttttggtttttttgagactgggtttcactctgtctcgcaggctgcagtgcagtggcaccatctcggctcactgcaacctctgcctcctgggttcaagcgatttttctgcctcagcctcccgaatagcagggattactggtgcacgccaccatgcctggccaatttttgtatttttagtagagatgggtttcaccatgtgggccaggctggtctcgaactgctgacctcaggtgatcctctgtcctcggcctcccaaagtgctgggattacaggcatgagccgccgtgctcacccagctctgcatttttgaatcattgtttataaaacattgagcatcaaataatatgtttttaaatattgtataagtaatactgtgttcatagaaacgttttcttttggccgggcgcagtggctcacgcctgtaatcccagcactttgggaggccggcggatcacgaggtcaggagatcgagaccatcctggctaacacagtgatacaaaccccgtatctactaaaaatacaaaaaattagccgggcgtggttgcgggcgcctgtagtcccagctactcaggaggctgaggcaggagaatggcgtgaacccaggaggcggagcttgcagtgagccgagaccacgccactgagctccagcctgggccacagagcgagactccatctcgaaaaaaaaaaaaagaaatgttgtcttttacaaccatatatttatcatatttatcagtagtttaggcgtggtcttgaaaaggaacctccccctaccataatgcctttcgtttaggagatccccccattacacttgtggcttacattgaaagaaaaaaaaaattatccccttgtctatggtagaaaactgtgtcattcgtggctttgactgcatcacaatccattttagctttttgtcacttaacttgagaagaaatgaaatatatgtggagtgtatatccctgaagaaagtaaaggaccagctgttatcactatagagtttgtattgttgctgaaaataatctggttatgtttgtaaggattaagtagtttattcaacagatgtttggtagtaaacatgaatgagaaaaggcttgttcttatcatattcattatgaatgctgaggttgtgctttactacatgttttcaatgctcatcctaactgaaagtatgaagtggaaggatcaatttctgaatatttaaatgagatgttgattgccttgttataaacattaacaattttcctaagtgtttgctcttgagatagagcatctttaggagaactttatgatttgggctggcagatttagccaaattaacaggaatgtaccttcctaatgtgatcattcatccctaggaacaggaatctgggaacactgaggctatacttctgtatggtgagttatcaaagtgttaaacacaggcactattaatgaagcacagattctactttcagagtaaagctagtgttactatctatgaaaaaatattattatttatgttttcataataataacttctacattatatttattttcaactttttagaataaatctgagctaggaggttcttattttagttgttttccttctatcgtttttcattacgctcttgttgtttgatttggtctcacattttaaaaagcttactgtataagaaagttttatcttcaaaataatgagcactagaggttactataaatggaaatacaaaatgtggatttactaaagtgttttgacttttacctacacatttcttggagtaatttttaagttgaattttaagaattattttgctggccgggcacggtggtggctcacacctgtaatatcagcactttgggagtctgaggcaggcggatcacctgaggtcaggagttcgagaccagcctggccaacatggtgaaaccccgtctctactaaaaatacaaaatttagccaggcgtggtggtgggcatctgtaatctcagctactcgggaggctgagacaggagaatcgcttgaacccgggaggtggaggctgcagtaagccaagaacatgccactgcactccagcctgggcaaaaaagtgagattctgtctcaaaaaaaaaaaaaaataataataatattgccatatattcgaattacacaataataccagattgaggatattagaggaaaacaaatattatattttcaatatttctaaagtattttttgtcttggttatttttatggaattatattacatttatagtataacctaactcttaaccattttgaggggtaagtttaaagattaacttatcactattgacgaattattcatctacccgtggaagtgtctgcagtttatccatttcgaaacatctaatattacatgagaatttacttttctcattagattacataaacatcatgttaaaatgcaatatgtacatgtgacaactgatcttttgggaaaaaaaaagtccatgaatcactcctgtaacatttggaattaaattcattaaccaaaataatatcatgcttcatcttttatattttgcttccttagcatctggttcttagtctgtctaattacattataatggctctgtgttacaacagttgctagaagatttttttgggggggggggcaagaatgatgattttgcctcatattttggaatacctgctttgcaaatgtctttcctatatactagagccagaaggaaacaaatctaatgtttcttattcgtttgaaatttattgggagaccaacttcattcaaagatcaagaactctaaaatttttacatcaaaaactatttttttccccaattactttgttgagtactgcacttccagtcttgagatcgaaagtaatgttgaggccgggcacggtggctcatgcctgtaatcccagcactttgggcggctgaggcgtgcggatcacctgaggtcaggagtttgagaccagcctggccaacatggtgaaaccccgtctctactaaaaatacaaagaaaattagccaggcatggtggcgggcgcctgttattccagctactagggaggctgaggcaggagaatctcttgaacttgggaggcagaggtcgcagtgagccgagattgagccgctgcactccagcctgggcgacaagagcaaaattccatctcaaaaaaaaaaaaaaaagtaatgtttagccttgaaattgctaatacaatggacggtatccagcatatttcttttttgtatgcaattaatatttttactttatttattttatttatttttttgagatggagtctcactgttgcccaaactggagtgcaatggcgcagtcttggctcactgcaacctctgcctcccaggttcaagtgattctcctgtgtcagcctcccaaagtgctgggattacaggcacgagccaccgcgcctggccgatattcttactttaacagttgaataagttaatattttattggagctatgcaattagttaatttcatatagtgaatatattaatatcttatgaggaagagccacaattttagtataataatgtagataattataactcaggaggactatgatcaagatacactgtaaggatccttcaccatattttaccaaaatattattttatagttcaaagggggataggacggtacacttccaattatgctgcaaatttgttattattactgaaaaagtctattttcttcttcaagcaattaactattaatgtctttaatgtcaataaaccgcatagcgttatagactctctttgaatttctctgaattagaaataatttttgaataggaagattaacacagactcattttaattctgtaatggtagaaataattaatctccccttatctgtagggatacgtgttctaagacccctggtggatgcctgaaactgtggataataccaaaccttatgtatatattatgtttcttatatacatacacatataacaaagtttaatatatacattaggaaccataagagattaacaacaataactaatattagaacaattataacaatatactgtgataaaagttatgtgaatgtggtctctatctctcaaaatatcttattgtactgtactcatctatttttggactgcagttgatcatgggtaaccaaaaccatggataagaggcagactactgtgtattttattatatgcatgttatatataatatatgtaatatatattatttgtatccatttggcaaacaattgagatttttatttcatgtagttgctttttgtactaatatagttatatggttgttggaattatgtcattaaaacacattaagccaagcatgctggctcacgcctgtaatcccagcactttgggaggccgaggcaggtgaatcacttgaggtcaggagtttgagaccagcctggccaacatggtgaaaccccggtctctactaaaaatagaaaaaaaatcagccgggcgtggtggcaggcacctgtaatcccagttacttgggaggctgagtcaggagaatcccttgaaccccagaggcagaggttgcagtgagccaacactatgccatcgcactcgaatcgagcctgggcaacaagaatgaaacttcgtctcaaaaaagaaaaacacacacgcacattaagagaaattatgtttgtcgttttgtttattctctaatttgattaaattgaacagaataataagtcacgtatggcaataccaaatattatgctaaaaataaaacactgaaagctgaaaaattcaatcacagattattggtttatatgacatcaggcttcaggctgataggagacgtccaaatgataggcttattttgttccataagtattgggcacggttcttagtataacaaagaaataaccgtggattgagaaattgttttcctcaccttcattacttaatagtagaattcccttcaatgtgccacttaatattccttgatgtcagagccttccatttgagcagctgaaattattgacacccctctcattcttcaaggatgtgttgtagggactgctgagtttctgtagaggtttaagctttgtgggaaatgatgttgagtatgacaatgttatcagcaacattgtcaacttcatggttgcctattgacttagggaaaagtggagaaaaatatgacaattgctgagtgcttagttgcagtagctttttaattttaattttcaagcatctgtgtataagcaaaagaatatacacagtgccacgtatcatacccattgacaagtttatcagattttaattataataaatattttaattaaaatgttttttaaaattattaattttaatgaacatcaaatttctctcttgtgatgtgataagggcagtgatagaactgacatttgaacgttcaatacacaattcggccaccattcaataggcttggattgtgcccatggttctgttctgtactaaagacacaaagatgaacaaataaaaactctgcccttgaagccatacagtcaaaatacagtgtccttaatctggggtccatgaaccatgataggaaaaaaattacatctttattttcactaacctgtaactgaaaatttgcatttctttccctttatgaagataagcaacacagaacggtattagcaatatctgtgaatttattaccaatatttttatatcaaatcctagttgttttggatatcttgaaaaatcatatgttaatatataccagtggttagtatactaatcactacttttaatttgtattaattattatgcttataactaatgtattaatagcatataatagtattatattcagtattttacaattgcaatataattaatttcctttgttttttatatgcttttagttttcattttgcacatttgaaaacagtctgggaagtgttccatatgcttcaccagatgccaaagggatccatagcacaaaaatagttaaggaccccatatctagaagagacacaggcaagtacatataataccatggtacagaaaaataacagaggcttgtaccatatgctgtgaaattgggcataactctctcagtccaaaggactgaagaggaaatttttgatttggccttgaagcacacgtgattgtttctctagtggtaacatgtgagagagggcattctaaaaaagagaaaagtaggtgcaaagtcgaagtcacccggtgagagcttgcagggtcagggaacaaagagcagtgtactgtggcaatgtaaacaaacaaagaaacaaacaaaaaaaccttttttttttttaaaccattgttgggcatcctattctgttttcatttgtcaatgtgcaagattgcatttgccaagcagtttttattaatcattagtgagtagaaactattctctggctttttattttaactgactatatttcatatagacaacaggcaagaaacatcaaagaagagatcaaagctctgcattagcgttttaaatctcattatttcaaacaacatctacctgtaaggggaaaaaaaaccgtaaatctttttcacctccccacttcgtcgttgttttcagacaacgatcagtcacttgtctggcctgtgggccataattggctacctgtaaatctcaagagactgaaccatgtaactggaataattttttttttttagcactacactacacggctgttattcagttataatggtcaaggaagctttagatgctgtacttaggctttctaaatgtgtgctttatttggctttctgggagaaatgtcaatgtgaatttccagattataatgaagttcatccagaaaaacaactatgatttaaagaagcagaagaaacaaaccggactgaaaaaatacactaatagactaagatagtgttttcaaactgttctagattaagacaattttgcttgcattctttgttgagcaagaaggttcacatcttaacttttccaataatcctctttaagaccgttattattggccttgatttcaaacagaaaccagcagggacctgaatggacactactagttaaccagtctaaagccttatgttaaagctaaacagttatctctaattttcaaaacaatagcatgagtatatattaaaaagtggttgatctagggaacttaatattccaggatgaactatactaaatgaaaatatgtaacacattaaaatgtggtcaaacaagccatctatagctgatagtacaaattgcatatatatctactttattaaaattttaactggccaataaaattgatactataattctaaatataatttttatttaagattacaagttttaaaattgaacagacttaggtttaaatcacttctctctcttcttctttttttttttttttccgaaacggagtttcactcttgttgcccaggctggagtgcaacggcgcgatctcggctcactgcaacctccacctcccaggttcaagcaattctcctgcctcagcctcatgagtagttggccctccaccatgcctggataattttttgtatttgtagtagagacgaggtttcaccatgttggccaggctggtctcaaactcctgacctcaggtaatccgccctcctgggcctcacaaagggctgggattacaggggtgagccaccgcggccagccaaaatcacttcttaaatgtgttattctgggcccagcacggtggatcatgcctgtaatcccagcactttggcaggctgaggcggtccgatcacctgagatcaggagtttgagccagcctggccaacatagtgaaaccccgtctgtactaaaaatacaaaaattagccggcctggtggcacatgcctttaatcccagctactcgggggtgctgaggcaaaagaatcccttgaaaccgagaggcagaggttacagtgagccaagatcatgccactgcactacagcctaggtgacaggtgacagagggatacttcgtctcaaaaaacagaagacaaacaacagcaacagaaaatgtattattttgtattagcttagctcagcatgtttgcttgtatgtaaagtagaactgaaaaaaaaacctaataaaattaaaatagggattaaatgcactaaaatttgttatttgttctacgtatttcaaaaatggtagtcattctaattatttattttagttaatggaaacattagttttattgttagtaaaacaatatattgttgatacaatatctagcataattttgcctcttaatgaatcaatcagcttgtcctttttattcatattttccttaattataaaccaattttttaaaagtcataatctatcagtagaaatggtactttattaaattcggagaatagtatcatttaaggaaaaatattcctagataaaaaaatatacagtactatgaaattcacatgcatttaaagtcattattaatttataaagaatctggaattataacctgaactaaataattctatttttttgctgaatgaatgaataaataaatgaatctttaggaacttgactgtcctccactaaagttaatgactccttcaacatattacacattctgttgctttgttctcatttctattataaatgcaagtttgcttttttgcatatggaatcaccatctataaattcatagtcaatatggggttttaaataatcattaccatggaaattatacttaagtattagttctgttggttggagattatgaatttctaaatttaaaaaaatgctgatttaaatttattatttccagtgccctatcctatttttttttcatatctgctactgccttcctaataaacttgtttagaaatatatcttgacagcaaatggtattttattcctaccctcttggcatgtattatacacaaactttgttttttgttgttgttgctgttttttttgtgtgtgttgggggggggggggggacagagcttcgctcttgttgccgaggctggagtgcaatgatgccatctcggctcactgcaacctccgcctcctgagttaaagagattcttctgcctcagcctcccgagtagctgggattacaggcatccgccaccacagccagctaatttttgtatttttagtagagacggggtttcaccatgttggccaggctggtcttgaactcctgacctcaggtgatccgcccacctctgcctccgaaagtgctgggattacaggcgttgagtcactgcacccggccttaaacttcttttcgaaagctttctcttttatacgtattgagttaattcctgtttgcgctgtgacatctacctgactaccacaaaaccttacagccacttgcttctgtaaatggaaaactgccctagcatgacaggatgtgggctgaagacataaccatatcgaaaacagcaagctttttggaaatctgtgtttggccctcaatttcatggcctcaagtaacttgataattttctatttctaatgcctgtcagccacaacaggatctgataaccaactaaaatctctgttggaagtgaataggggaaaataggtgaaatcacatttgatgttgtaagggaagcttattgaagacagtggatgtgttcaaaacattatgaggcaaataatgaggaggaaaaaatatgaggaaatagatcaccaggaagccctgtgaatgtttatgttttggctttacatgattactagtaattaaattagtgaaaaatattttatggaatattcaatatgcccttaatgtacaatttgctgagcaataagaatataagactacaaacttcctcttattggaatatacattttattttttattttgttgtacttcaatagctttagggtttcaagtggtttttgcttacgtgtatgaattgtataatggtgaagtccgggattttattgagccgtcacccgagtagtgtacgttgtacccaatatgtagttttttatccctcattcccaccccctccacttctgagtctctgaagtcccttatatcactctgtatgcctttgcatactcataagttagttcccattataagtgagaacacacagtatttgattttccatttctgagttacttcacttagaataataacctccagttccatccaagttgctgcagaagacgttatttcattgtttatatggctgagtagtattctatggtgtgtgtgtgtgtgtgtgtgtgtgtgtggtgtgtgtatctcacattttctttatccactctaaggtggattctatatctttgcgattgtgaattgtgctgcaataaacatatgtatgcaggtgcctttttcatatagtgacttatttttattttggtagatatgcagtattaggattcgtggattgaatggtatacctacttctagttctttgagaaatctccatactgttttccagagaggtattaatttacacttccaccagcagtatataagtgttctctttttatcttgtccatgccaacgtttattgttttttgactttttaataatggccattctggctaagataaggaagtatctcattgtggttttaatttgcattcccctgatgattagtgatgttaagtattttttcatgtatttgttgatcatttgtatatcttcttttgagaaatgtatattcttgtcgtttccaagctttttaaagagattgttttcttcttgctgatttgcttgagttctttgtaggttgtagatattggtcagttgtcagatgcagtttgcaaatatttttttccattctgtcggttttctgtttacgttgatggttatttcttttgctgtgcagaagctttttagtttacttagatcccatttgtttatttttatttttgttgcatttgcttttgaggtcttggtcataaattctttacctaggccaatgtccaggagagtttttcctaggttttctttgaggagttttatggtttcaggtcttagacttaagtctttaatcctccttgagctaatttttgtatatggtaggagatagggatccagtttcattcttccacatgtggttgtcccattttcccagcaccatttattgaataggctgtcctttgcccaatttatgtttttgtatgctttgttgaaggtaaattggttttaagtatttggcttcacttctggcttctctattctattccaatggtctatgtaggaatagacgttttaaaatgttgcaattggaactatggataaacctttaagataataatttttagccactgttcattttaactgggggagaatgggaaaaaagtttaatcactttaactaaatcagttactttgtttacatatatttagctctgataattacaaggagattcacttttgagtttgaaaagtagattctaatgcctaatgagagttttcacattgtctttgagaataaacactattttaggttattactgatatttcagtttgtgaactaataattcagcttgtgaattttacccaattttataaattcacttttcttacttgggcgtctgtgtttgaattaagaatggttaaatgtttctttcatacgcgtccgtgtgaagagaccaccaaacaggctttgtgtgagccataaagctgtttatttcacctgggtgcaggtgggctgagtccgaaaagagagtcagcgaagggagataggggtggggccgttttataggatttgggtagataaaggaaaaaggggggttgttctctggcaggcaggagtgggggtcacaaggtactcagtgggggagcttttgagccaggatgagccaggagaaggaatttcacaagacaatgtcatcagttaaggcaggaacaggccattttcacttcttttgtggtggaatgtcatcagttaaggcaggaaccggcaatctggatgtgtacgtgcagatcacaggggatatgatggcttagcttgggctcagaggcctgacagtttctacatgatagtctctttattcaaaagaaacacactacattattattttaaaacgttattaacatatttttctgtgctagaaaattttaagaaacaaacatttaagtgggctaactcatttagaatttgtaaaatatgacaaaactctaggagaaagtttacctgtgaaaggagtctgttatgtaaatcaatagtgtaattatgattcaataaattatataaattcctaatgagcactatcaatttttcttttgctaaaatctactgatattctacttttaaattactctcacttttagtgttcccctgaggacttatcagtttggaacacttaaatttgagttatcgttctgttcttaggaaaaatatatttaaagaaataatgatttattatgctagatttatcattatttttatttgggattgcttttaatgtgcatgagttacaaagacataactgtgagatcccattttctataatttttttagtgattccatacatttctgagtttacattttttaaaaattatagctcaaaaaatgcaagacataagtaagtatgcttttctaatgggtcatttcagtcgcgtccgtgtgaagagaccaccaaacaggctttgtgtgagcaataaagctttttaatcacctgggtgcaggcgggctgagtccgaaaagagagtcagggaagggagataggggtggggccgttttataagctttcggtaggtaaaggaaaattacaaagaggggttgttctctggtgggcaggagtgggggtcacaaggtgctcagtgggggagctttttgagccaggatgagccaggagaaggaatttcacaaggtaatgtcatcagttaaggcaggaacaggccatttccacttcttttgtggtggaatgtcatcagttaaggcaggaacaggccattttcacttcttttgtgattcttcagttacttcaggccatctgggcgtatacatgcaggtcacaggggatatgatggcttagcttgggctcagaggcctgacaggtcagttatggaaacacatcaaagtactctagaaccaaaagttaatttttgaaagaaattaacttaatgtacagattttataggaattctggacgtatttaatatcgtgatgctagaagaatgtcttaccaattaatattactggatttcttgttgtgtatcaagttgtaacagataccttaatcacctaccagataggctcattcctgtgtccattccaatagaactctgattttgctcagatctccatcctcacaatttcacagtagtcttcagtaaagaaatgagactaccccttgtcacagaaaatgaatcatactttaattcgcttatatgcttccataccacttgccatttacgggtttaagtatgtgcatgagatgcaacctgaaccaattaaacatcaagtaagtttttcttgccaatgaaaagcgttcacttaacaactaaatgcttgagcatttatatgtagatatatatgtacatatatacgatgtaaaatgtagaatgcccactgattcatttataatttgatatgtattagtatgtatttaataagctcttataagactgaatggactctggatatgaaataatataccaagtatggtaacacatggtaacacatggacaaattgtagtggaatcaataaagcattcagagaaatacatcattattatttattctcccactttaggaagatttcaatcctagcattaaatgtaacactgtcttttttaaaataaaacctccatttctaagaagttatttgatgagaaaatatttgagaggttatctgatgagaaaatttgaagaaaaaaattttaactgtacaaccagttaattagaactttgtcaaataacattgcctttaattcccagaaatccaatacattatgctcagtgaactgtaacacctgagtttttaaagtggaatacttaaaaaaaaaaaaaaacaaaaaaaaccagccttctggggtaatatctcctctttggaagtttctttttttccaaaattatacttaaaggacgattcttttaatgaataaattttagagttatctcaaggaataaatagaggaaatattattttatttcaaagagaagaatgtctattgtggcaaacaacaaacctgaaataaataaaacgtgacagtctatgaagtccgtgagcctaaagaacaatggttattttactgtcttagaaaagtttaggaagtttggatttgaattcaaactttaatttgaacttataacgtcaacttgaaatcatttggaataaacattgaaaaccttctttgaaagttttatcaaaggagaaagaatttgaataccaagaggatggaaaggttaacttctgttatctgaaatatcttcaattgccttgagccagtttaaaaataaacaagcttactgatatagagggaaacaagtctaccttgtgaatataatttaaaaaagagaaaaaatgtcatttaccatattatttacttcctcattttagaaaagggaataaacatttattaattatgcactatcaggcactacgcattcaacacacactatcacattagttcttcccaaaagccatttgaagtagtttttctttctttttttttcttcttttcttttctttttttgagagatggagtcttgctctgttgcccaggctggagtgcagtggcacgatctctgcccgctgcaacctccgcctccctggttcaagcgattctcctgccttagcttcccaagtagctgggactacaggcatgtgccaccacgcccagctaatttctgtattttttagtagagacggggtttcactatacgttggccaggctggtctcgaactcctgacctcaggtgatccgcgtgcctcggcctcccaaagtgctgagattatgggcgtgagccaccgcacctggcctgaagtagtttctcttatgcccattcatcaatatagataatagggttcagagagatttttcagtaatttacacaagattttacagctcctaggtggcagaatctagacttaaatttagatctgatccaaaaactgtattttcctagctttagtaggacattaacaatacaagtgcctctttaatatgcttaggaatgcatttttatttatatgtaaaaccaaataaacaaataaacgctgcgattgccaacaaagtatctttaatgtaagaatttcaaatgctgtgcaaaattatcctcactaactgctcttctggtcccacacttgtcacatggctacagaatatactatatctctctttctcttccagcagcttcctagtggccacacagggaccatcctatccataggttatagttgctttttaaaatctaggcatttcctaggagctgatgagattttagaagaggtgatattaacatgaaaaaattggtaggggtagatttctgagatattctatccaaattcaggagttttacaattataatttagttaaatattgtacttgatacacatataattccattaatacactctgagttaattgattttcatttattactcatggttttcattttttgttttttgttttttgagacggagttttgctcttgtcacccaggctagagggcaactgtgcaatcttggctcactgcaatctccgcctcctgggttcaagcgattctcctgcctcagcttcccgagtatctgggatgacaggcatgcgccaccatccctgactaattttatattagtagtacagatggggtttcgccattttggtcaggctggtctcgaactcctggcctcaggtgatccacctgcctctgcctcccaaagtgctgggattacaagcgtgagccaccgtgcccggcttcatcgtttccatctttaacaaagaaatacatgatatttaaagaaattttaaaagtataattttaaaacagagggaaagccacccacagctaaaacatcctttctctaaacagtttattttttccttaataaagttagatattttttggtgtctaactttgcattgtaaaacttaatcattacttacattgctccataatattctgtcatatggttttgctgtagaactgatactgagttggtgtgccccttgtaagaatagtccagtcattttaaaccagcatctgtttggattgggccagcatctcttccagtgtccttgagtcaacaatgccttaatggtttctacatatatttttaaatattacctatagatagttcattctttatcttcttatgttgcgtgtcagagctattacgttagagctattatgtaattttggcttttttatatatcattgcaattaacactcttgtccattaatctgtttgggttttttttgttctctagttgacatcttatgacaaatcaataggtgtgtaaactatgtcgatttttcttggctgtaaaaaacagtaaagaatgcttacagtacacgttgtctttatgaaaggaagttccatttgaagaaataattaaaaaacaatctgttttgcctttaatgggcaagatgaagagttaatgccactatatactaaatatcttaatctcgacatgaaatgagaactattctagagatatgtttctagatagatatggaacaaccacaagttcatacaaaatttgttaattttaagtcatattttggacttttattaactcatatggagtgacgaacaaatccttaattaatagcagacatatcatcatctctggatgcttatctatcagagatcagcaagaaaacaaacacacggcatgctaaaatgggtaaactatgagaggcaataagaaacaatattcaaagttgtgggtagggttaagggaaactaatgaatactgtgatgcaggtggcccctggctctggggacaatagaaagacataacccaccactaggcctaaaaaaggtaaaatgtgagggagcaattactagatcctggaaatggaggagctgaggagagaccgcccaacaagagctgtgacctttgaaaaagaaatacagccacttacaacctgagctcttgcaggtgtaaaaagtagaggtttctctccaaagaaactttcctacccatctaaatgggaataaatagtaacgtctcctagaagcaaaatttattaaacgacctgtgctaacattcttaaatatctactagccgtaataaagaaatcaatgtactttatgttcttagttcccacaatttagcctaaatatttgccctggcatgcttatactggtccaagcacgcattaggtcatagcctgttcctcttccttatttgaaggtgtttttacctttctcagcaagtaacttgtggaaacaagttacttcctccttcctttgttctcctctgcctttgtctcttttgaaaagttctaagttgctagccaatcgggacaaatacagaatgtgtggtcctgttccagccaatggaaaccggacacagcagtagagtaaacatgtcaggttataaatgaccctgtctcctttgttcggtgtactctcgtggcaaaactgctggcgagtgtaccctttctgcaaaaagtaaaaatgaccttgctgagagagttaaatttatgttcgagtgctgtttctttgcagcaccagggaacaagcattctgtttctaaataaacattgtttacatataacacagggaaggagcagtaaagaggatacagcctccacacacctttgaaaagcactcaagttataagtctttagtgccgtgctacttaagagaagggcttgggtttgccctaggttatggttatgctaagctcctcacaatttttataccacatccaatgacagcagacccattcaagcagaattggtttacaccatgagaaactataattcaaagaaagttagcaacttgctcctaggcatacccatattaaccaatattattcagtatatttatatacagcgcagagaacaacaattttaatggcattgtcagtattctttgatagataagcaccagttttgtgatatttaaaaagctattataggtgttgaggcttcgttttctcttccgctaaactgggatgaatctttctgaacagaacaaatacatatattctgtcctatctgggaaagattcaattatgtgttgcagtccaaatatgctgtattatatttacaggtaaaatcatactagcagaccagagtaaataactaggtaagttcctcttagtgacaataaaaagttatattgctcagatagtgctaatagaactttctgcaatagaaatgttctgtatctatcatgaccaatatagtagccaatagccatatgtgactattgagcccttaaaatgttactggtggggctgggcatggtggctcacacctgtaatcccagcactttgggaggctgaggggatgaattacctgaggtcaggagtttgagaccagcctggccagcatgatgaaaccccgtctctactaaaaatacaaaaattagccgggcgtggtggccagtgcctgtaatctcagctgcttgggaggctgaggcaggagaattgcttgagcctgggaggcagaggttgcagtgagcccagatcacaccactgccctccaggctgggcgacagagtgagtgagactctgtctcaaaaaaaaaaaaaaaaaaaaaagagtctcatgtataaatactgttttggacacacatcgttagaagacagtaaaggtgacactgtaaaaattttaaatcattaataactaattaccaccccaatgtaaatttcactgatcactgtcagtattaattctacagtaacatctgtatcaacaaatttccatatccctttcactggtattagggaggagatatcaaaagatggtaaacccagagcataaacttgtagatgtttggtaatgaaatgggactggacctatttgagattgtttcacaattttaaatcagggattggttatatagagctttctttcttgtattttttttctgcttctatgtggaaccatctagaatgcttgtgttattgctttaaggaaagtttttaaagggattcttaaaaaatacagtattttcctagcatatctctgaggtgataaaagtctaagaatcatagtttatgtgttttattcagatccagctcattctctcaactgttaaataagattcttgagaacaggtattattttttacattctggaggatccttatagcacatagaactatactgagaccaaactcgataatttcttataattttgattctgctggtaaaacacaaacttgatattgaaaatttgaatattctggacattataatttgcttatgaatcattctgtttgatattcccagataccctttgctaaggcagctcagaagggaaatatttgttcttgcagtttgtgtggttacgtggtttgttgtaaactttccctttgacctaaagaaatattgtccctttggccaggtgcggtggctcgcgcctataatcccagcactttgggaggctgaggcgagtaaatcgcttgaggccaggagttcgagaccagcctggcccacatggtgaaaccccatctctactaaaaatacaaacgattagccaggtgtggtggtgcatgcttgtaatcccagctacttgggaggctgaggcaggagaatctttgaatctgggaggcagaggttgcagtgagccaagatggtgccattgcactccagcctgggtgacaagagcaaaactctgtctcaaaaaaataaaaaaaaaaaaagtcgtctccaaaatatagcatggcttcaaacagatcgcattatctctctgaaacattttaacttatagatttaaaaatatatcttacagaaacattatttagaaacacaactttagtttacctacctctataaaatctccagagccagagtaaagattaaaatatgcattcacaaagagctttttaaatcatctctttattttacatctcccaaaaattctggaagaaggccgggcgcggtggctcacgccagtaatcccagcactttgggaggccaaggtgggtggatcacgaggtcaggagatcgagaccatcctggctaacatggtgaaaccccgtctctactaaaaatacaaaaagttagccgggcgtggtggcaggcgcctgtagacccagctactctggaggctgaggcaggagaatggcgtgagcccaagaggcggaggttgcagtgagccgagatcgcaccactgcactccagcctgggtgacagagcgagactccatctcaaaaaaaaaaaaaaaaaaaaaaaaaaaattctggaagaagtagtgtttgatttagcactcttaagggacaccatacatttgatgttgttaaaatagcttacaggtttatattagatttctattatctatcctgtcttcatttttggatatcatgtaaatatgttagataaataaattgagattgatttctaacaatttgtatgcattttgagatggcttagaaaacattcaatgcagaagttgatactgtgactcataccaagcatgctcctttgaatataagaagacaaaacttctgaaatgaggcaaatttaaaatatgacaggtttatattctggaggtagtgctaatagcccccaaagctactgatacatgagtttgtacactacagaaaagagaattaaaaagaaagtttgcacttcattgcagttccactcttgattattaatataaatcgaatgtaaattagtgaacttcctgtaaacacaacatgagcaatgactaatattgatagtctactcttaggttcccttgaaattgttctgcttgtctgataaaaccataacaagggacataaaaagattgttttaatatgttgagtgaattgtacatgaaaaattacattcccataaaaggctgatctatgaatgctaacatttatgttgttcgctatttctgtgtacttataccacccgtgtgagtgttgcttgatttggcagaagtaatggaattttaaaaagcagttgcatgagcaaatatatctattttccatatgtacatatttgcaatttagcaagtcatttgcttttgtttaaatattcaaaacgttgtcatatgtgtgttgtacacattaagattttatgtattttaaaaattatatatgtgtattgatatatttgtatgcacacagagcaaagcttgaaatagcaaaaggtaattacatgcatattgtatatactactttgtattaaaaatgtagtttattgatctttaaaaccaaatttgtttttgtaataaagagtaataaaaaattagattatgattttttcctttcaaatatgtttagaatttaaaaatcttggctacccctttaacctaaaatctgtcttacttacctcaaaatgcccttgatcccaactacatgaaatttcttgctctttcttttttttctttttttttttttttgagatggagtcttgctctgtcgccctgcctggagtgcaatggcacaatctcagctcactgcaacttccacctcccaggttcaagcgattctccctcctcagcctcccgagtagctgggattactggtgactgccacgatgcccagctaattttttgtatttttaggagagatggggtttcatcatgttggccaggctggtcttgaactcctgacctcaggtgatccacctgccatggactcccaaagtgctgggattacaggcgtgagccaccgcgcccggccttcttgctctttcttaaatatattatgtaattttatatagcacatgcatatttctgtgtctgggacacccttcctccctgtatctactccttgctatttcttctagcctaatttagatccctctttctatgtttctctggctcttttttcttaagatttgtcaagtcatgctgaaactattgccttgtctttctcaaaagactgtaagttcattgatggcagaacttaagtgtatattagtatctcccagaactcactcagggcctggcatagagtagcataaaagtcagtgttgttgaatgaatgaagaaatgaatagaatgataactgctttctacaggtgattgtgtgtaaacaaaaagtcatatgattaatccttctatgagcaaaagttggctaagattacaattaaatctgaatgtgaagattgtactgcagaaaaaaaaaacacacattttcaatagttatgtcacaaaagcaacccatcatgatacaagtagaatctgcgaacatttcttttaaggtgcgtataaactcatggcaaatttatgttgcattagtctttttgatgttctgaactttcataaaaaatcaacatagtatttaaaatctattgtaaaatatattgaagtttcattgattttattaaaatattaattcctttattttatatctatatataatataatcaaatctgaaaactcatcaagattatggcctagttgattacgtcttagttattatttgtacttttccatagccaacatgcaataaaagtttggttctagataattttttcctgttttacaccgtttcaatcaaaacatgttacaattgagtaaaacaatctgaaccagccttttataatacatgaattccaagattgtactaatttgtcagtttttgcttactgtctttcacaatgatttggagacataataaaatgtgcaaccaaattagtgaaaataaagaagtatatatataattgactagagccaaatatgtatgcagatttaaggcctgatgttttagttcactcattcaaattttaattaaaaacagtacataaaaggtgctagttgctggagtatgatgagaaaacaaaacagtaacaagacaaaaactgaaaacatgtttcctatccttgtgaaacttactgtcaatggggaagacgtacactcagtcagagaaatgttaatatttacaacgtaaagtaatatttacattatctgtattcagaaagagaatatcaaggaagcctattctgttggagtaaagagcttatgcaaagctcctattgtgggaaggaacagaaaggccagggtaactatatctaagaagaaaattacaggctgggcacagtggctcacgcctgtaatcccaacactttgggaggccgaggcgggtggatcacctgaggtcaggagttcgagaccagcctatccaacatagtgaaacttcatctctgctttaaatacaaaaaattagccggacgtggtggcgggcacctataatcctagctacttgggaggctgaggctggagaatcgcttgaacccaggaggtggaggttgcagtgagctgagatcgtgacactgcactccagcctgggcgacagagcaagactccatctcaaaaataaataaataaaataaaataaataaataaaaaagaaaattacggtgctacaagacgaggaggaactacacagaagcctcttcattcaagaaatgaaagctcctgagttcggatatctatcttaaaagcagtagtatgctattgaagaattgtaagcaaagggtgtcttgatcacattcatctgtcaaatagctctttattggtgaggttatgagaatgtattgaaagtaatgtaatcaaagcaaaagaggtcagttgcttggattaagggtgttggctaagaagataaataattgattcgtatgttattctgggacccctagaagccaaagaaaacggaaaataagaccaattataaaattcttattttcagagacaagaaatgccttcaggaaaagggaatttttttgtataattgtctactaaaagaaaatgttcacttatgactttagtgtatatagaccaatttatttagctttaaagtgaaattaatttcaggatatttggtagtaagttttagcaaaacctaaagaaaatagtaaagcacacatttctgttattgatacataatgatcagatatatttccatgataaatgtgatattataaagcacaacttttaaaaaacatttttctagagattatgccttaatttcagcctgtggaacatttctttaggagatattcatggctgctctgtgtccaactacatttgggagtcacctcatactgaatccttttatatactgggtcacttgcaaaggcttaattgagcatttgactgtcatatgccacagaatggatcggacactataaataaaacacaaaagagagtttgtcttttctgggcttcatcttcttaaaaaaatcagctattagacaagcatatgtaagtagtcaagaattatgataaattttctaaataaaaataagtgcatgagagagcgtaagagtatttatttaattcaggtttgggatcaggaaggtctcactgtggaatatttatctaaaatgtaaagggtgaaccaagaaaacagtgatgtggaagagcattagaaaatctggaagaaacacatgtagctgaagcaaagattatgcttattttgaagaaccttttagctgcagtaaataaaagacaccaaattacctccaattctgtaaagcagccttcatgactattcttcactttgttcacaatttattatctccagcccgtactaaatagataacatcatctcctacttcactgggggcttgaagggagaaaacagtgaactaaacttttacaagacattatttgtccagctggaaataaaaagtagaaaaaacatagaactttctatgtatagaggttataaagaccttaattgctttttaatttgtttagttcatgcatcctttgtcagtctgataaaagctgtgggactcctcagaaaaatacacagtgaatatcctttacatacaaccttttacataaaaatccagcagttcaaatgctcctgcaatccattcataagccattcataatccattcctaaaccagcttttggttaagtatccctgctttcaagtatcttgataaaatagtaaaaggaccagaagatacataaatataaatagaaaagtaaatagaagtgtgtgtctgctttactagaattttgaaatatcatgtttaaactataaattttaaatttagtttatggcttaagtacagatcatatattcccataaatgtgagtatatacatttatgtgcaaaccttcgctcacaaactcatatgcttagtgtttgagatttctcagtcctggactgagagttgggaaaaagttatgttttctttaacattctctcatagaaccaaaataataggagaatcagaaaaacataggcctttacattttggcttgagatcagcttctcgccatacctctagtacctcagacaaattacttaacatgtttgtacctatattttatctactttaaaatagaaaagaatacctaacacaaattgttcttatgaggataatatatgaacattgactgaaagatttaagctttttttacttaaaattatcctgttatagatagccttttctcaagaagtacataaaaataataatagtaaagctttgtgaccacaaaaagctacctacagtatatgtatgatgtttaacatatataacttgatatatataatatgacatatgcttgatatatataattagacatatgcttgtctaatagctgatttttttaagaagatgaagcccagaaaagacaaactctcttttgtgttttatttatagtgtccgatccattctgtggcatatgatagtcaaatgctcaattaagcctttgcaagtgacccagtatataaaaggattcagtaagaggtgactcccaaatgtagttggacacagagcagccatgagtatctcctaaagaaatgtatatatataatatcgagttatatataatatatatgttataatatagaatagaatattctataataatatagtatagaatagaataatattctatactatcatttaatatgaaactcacatagactatatttgtagctgtgggtaaatacatgtatgtaattttggtatatatacgtggcttatgagggtttttatggagacatgaatatggtgttaactaaattattataagtccaatgagctttgtgagatggccagtcgaagcaaacaaattccatgtatctccgaagccatttcctctagattgactgaaaaaaaatcaatttcctttaataaacatattttacaagctttgtagctatcacttacttcgtggttaaagtttacatctatggaagattacacagtaactttgtgctcacatgattgagtatcttaggggtttttatagatacatacttaaatatgtcagggaacttcatagttgtatgattggatgtactgggaacttcttgctccttctccttaatttgtgaaatcaagagacagagttactgcaaatttaaacttgagtaagtcctttgctctacttcatttttctcccgagaggcttctttttttttaaacgtccttttgtagaggcaaaatgtaaatattctctgaactctacttctgtatcttaccgtgaagaataataattagctcattaatttcaatttttgtaatatgcttaggtcaacaagattacttctaagggctcctcatcaaatacccctgtgtactttaggttcttttacttttagcaaggctgattcaaagttttttaattcataacttttttaaaaatttttccgagagtcacattgtatctcctttatactgacgtttattatcaggctgtttttttttgagatggtgtctcactatgatgcccaggctggcctggaactcctgggctcaagttattctcccacttcagtcccccaggtagctgggattataggcgtgagacacaattcctgggtttatcattttgtaaagctggagcaatcagttaagaatggagaagcaacagggccgcacggtggctcacgcctgtaatcctaacactttgggaggccgaggctggtggatcatgaggtcaagagatcgagaccatcctggccaacatggtgaaaccccgtctctactaaaaatagaaaaattagctgggtgtggtggtgcgtgcctgtagtcccagctacttgggaggctgaggcaggagaagtgcttaaacctgggaggcagaggttgcagtgagccgagatcgtgacactgcactccagcctgggtgacagagcaagactctgtctcaaaaaaaaaaaaaaaaaaatgaattgagtagcaatagatatcatgagcctcctcatggcgccaatattcgtttgaacccgccaacttcacatttagatatatgtgtctacgttgctggatgggccaggctatttgctcatctctcagttattttactatcctgtttcatctttttccataacactgttacactcacctttttgtgtcacttttaccagagccagtcattaatgaacaagaaatgtctttatttcatttcaaaaaagcaaaatatttctttgaaaattaaacagttaatttccaagccactcattaaagttattttattataagttttaatatcagaattataaaaatatttaatatgtcatctggtaattaatatttattcttttttttgagatggagtctcgctctgtcgcccaggctggagtgcagtggcgcgatgtcggctcactgcaagctccgcctcccgggtttacaccattctcctgcctcagcctcccgagtagctcttagcagcttcttaattaaagaatccatagctctctaatgcacatacgattgtgacatatttattcgttactttaagatcctcccccagtgttgaattctaccaattgcaaggtgcttccatggctttggacaaagtacagaagaattaaataacttcacagccttcatggaattcacagtaaggcagatcccatattaactcaattaaaatatatttagtcaaagccagatgcagtggctcacacctgtgatcccagaactttgggaggcggaggcggatggatcatttgaagtcaggagttcgacaccagcttgatcaacatggtgagacccctgtctctactaaaaatagaaaaattagctgcatgcctgtaatcacaactagtctggaggctgagacaggagaattgcttgaatcctccgggaggtaaaggttgcagtgagctgagatttcaccactgcactccagcctgagtgacagagactccatctcaaaaagcaataaaaataaaataaaatatattgagttgaatactgaaataggggtaactttgggaagctatgggccgcaaagcagagaatgatgcattcagtttgggggagctaagattagtttcgtaaaggaggtgacatcttgaagacatctagaatttcaatagacatagaaaaaattcatcgtaagcagagggactagtgaatataaagaagtcataaagatccaaaaagaactcagaaataatcaagaaggtgagggtagctacatcataattataagagccaactttattgagtacttcctttgtcaccatgtgctaagttctgtattttaatatcctcattgaatgcttgaaataatttctatgaagaaagatctgttttatctttattttactgggaggctgtgaaatatgcctaaggtcacacagctatcacatggcaaaaacaagattcaaacccccacagtttctaattttaaagcctcagcataatgaacacagtattgtactgaacagaatgaatgaatgtgagtagaaaagacatttctgagaacaaagctggaaatgtatcatacaaatcaaataaacatttcttgagaaatccttggggaagagggcaatataacctctcaaacagtagccagaatcatcaacacaaatatgtattttaagttctcacaattggtctcgccatatgaactaaatgctagatatttacttgcttaatgctaccaatgaattttcaaatctttccaaggtgttaataattttattgcttttttataccaagagcaagaatcaaatgttagttgctattgatgtttacattttaaataacaactttaatttagcctacaatatttagcaattacacaggaatcctctgaaagcttttaaccagccccagaagtaaactggctttggatgctaatctcttgagctttcctgactgacaagtttcctccctagaggaggggaattggcctgtctcctaaattttgcatggcctaaagcagtgagtttagaagcacctgtgtttcctggcaacaaacataacatttgtggaaaagtctaattatttaaattcctctgcatttttctaattgaggataaagtgctgcattctaccttcgcattcttattttattccttggccctttaaataaaaaaatacataaaatgatgtggtcagctaaaatatattggacaaacaaaacccccttcctttatctccctctatcgctctctatgtatatatattatatacatatataaaatatatataaacatatatatgaaaacagatatttgtgtgtatatatacactaagagatattatagtttaaatattttttaacatacactttaaaatctaacagcttggattttaatattgggtcagtctttctaaagtgtttaatattttagtttggaagtattaattagcaattcatgaatgagtaattaaaagtgctttagggggcctttcacatcctataataaataccaaaccttttaccacatttcatactataaaatcttggaaccccattatataactatgagttattaatttctgttacctacttttaaaatgggaacatatgttattaacaggtgttgctttgaaatctatattagcaaatgttctaccttataattagtttttgacttatcacaaaaaagtattttattttttttaattacatagtcacatttcaaggttaactttaaaaaattctaaattatctgattttcatgggaaagagatttgatatttgtgccttagcattttggtatttttctctttctgtatagcaaacctttgaatgatagtctgtctgaattcacagtgaagaaaatgatcagaatattgactgtcaacagataatttagaaggttcaatcctatgataatcagggatattttccttatgtaaatgtgttgatttatcaagttcagctatgtcattgattacatctaggcttcaggccttctgtgaactgccagctctactcaattctggcttgtgaatgttatcacatattttagtcaaatcagaggttatattatacacatctgacatttttctctttgtactaataactttttttctttttttgtttttacatcatggcataagatcaacactaaattttaggagtgcatagtaagtattaccatagtgtaatgctatgccaattgttttctaacttaatatttgcaaaactgggttttatggttgtttctatgcgaattgagtgcctctacagaattttatccctgagagtatatgagtggtgagtgataagagatactgaatgtctcagaacatactagcatctgacagcctattggtaagatagtgtaagtaaagaggataaggaaaatctgacttgaaaggagaataaaatctgattggacagtctgtagccaagtttgcatattatggatttacaaaatgaggttgttttgaattcttgattaatgaaacataaactgagttgttttaatattgcgtgccatttgaaataaaatgcattttgtcacaaccctagaaatgggaggttatgtgttgtaaaatattcttgttcccatctagaagacaccatattttatagagaacagtggctgaagcttgttttactaggaacaagtatggtgtaaggaaataacaataattaatactggtggcacttagtgctatagtaaaagtaaatttctaattagaaaataattaccataaaatactgaattatatctttgtaaggcctttagaaattgaatcactaatttaatatataagtaagtcaatattatttttatgagaaaatggacaacttacgaagttgttgttatgttttcaggccatattccatttttcaccaaacaagttatttccctgatacactcacttaaatcatcagtaatacatataggtttaaaaatgttttgtacaattctgaaagcctatcttagtttaatgaaacataataccataaagcttccctttcctccaacatttgagctacaataaaacaaccttgtacaactgataacaattaactcaccacccccaccccattgcagtcattagaattcattactaaaagctcatttgtttatggtaaaataaagtataagggttttgaaaccaccactgcaaaattaggactgagacagtgaaagagatctaacttaactgactccatcttgcttctaacctccactaatttatagtttatcgtttaaacaaacatcataacagccctttcccaaagcagaccttcttgcctggggactagattgcctctgtaggactaacatcagccacagtattagaaattatggtttaggagtcatgcagctggaggcaacaagattctgacccccaccaaactgctcctaagatcagtgcttgagataatttgcagaccctgcacttgatggatcagctggcactacccatatcaataaactggctcatctgatcttgtggcctccacccaggaactgactcagcgcaagaagacagctccaactccctgtgatttcatctctgaccagtcagcactcctggctcactggcttcccccgacccaccaagttatccttaaaaactctgttccccgaatgcctggggagaccgatttgctgatttgagtaataacaaaactccagtgtcccacacagccagctctgcatgaattactctttcttcattgcaattcccctgtcttgctgagtcagctctgtctaggcagtgggcaaggtgaaccccttgggtggttacaaatttgggggctcacccaggattgcccctgtggctacctgcctgttgtttggtggccccctttcagtgatggatccagaaggcagcccaagtggctgcctaattctcttggactgggggctgactctgttactctgtctactggtggggtattccaacccaatgtgcgtggacttaattgcaatggaaaaatagtcatggggagatgtcccttaactgtagccctattacagggtatctgtagcctcatggtggggtgtctatctgtagctccgttttggggtgtctggattggtgagtatcctaggtgctgccaatgcctgcttcattctcctgactggttctgtagccctatggtggggtgtctgtagccccattgtggggtgtctgtagatccagcatggggtgtctctgtctgttactccattgtggggtgtctgttcagctcctgggaggtctcagttcgctctttctaactagtaggaagactactggtttgggagacttctcttcaatcaggaagattttgaggaggtttctcatacagaaaataggaggatagtttggaagggatactcttggacttcttggttagggatctgatttggaaggccttctgtccctcttgtctttgcatgtgtttaaatatgtgaaagggatctcagaaggggttgctgatagaagtccagcatgcctaactcagagaaccctccttatttgtctggtcacattcagtgagctctaaagaaggctcaacagtcctgtctctcagggtgactatctgctctttcccttgcccagagacctcattgtgaattaccgttcagaggtcatccgtccccacctggtgtggatcaaagacaacagggaccaagatgaaaaattttgagctttgccaggctgatattgggtgcggaaagaggtgactaatgtctgttttgttatgtgtattttgctgggttggaaaatgttaattcagttccccatgcagcccgttgggcagaatcttgcaaattaagaatcttgtttatggttccataaaatggtaaagggtgattttatcttgtaaagtggcttaaaccccacagctatagcacaagcaagcagggtcgtaagacgccactccgttcttctggaagctgcagagaaagggaacccagaaacctggcatcccagcaataagggtaagaaattcttatcagtcaagtttctggtctctctctctctctctctctttctctgcattgttaaatagtaaactatttgtctcctctgcaagggtttggttaatagaaagaaggatttgtgagactaatcttagcacatctgatgtagtttgtgctaagaatttgtctttctgtgttatgtaatggagagagggatatcacgtgatagaacgtgggttaggacacccataagtctgcttttcaagtcagcttgggaggctggtcagctacaaactttgctacaggtccctgaaaccaatactctatgaaatttctctgtcttgttttgtgtccttaagagcttaaccttgtgaccatgtggggatactttcttttggtttctaccatccagaggacaggaattttggggttcatgtcatagttactcctaagatttttcttgagcagttaaaagccttgcaagcctgaaactggcttctctaggctccttctgggaaaagcagtagaaatttctcaacgctgtatatagctcagtagctaaggctttgtcttttgacagtggtggcctgggttcaattgttggcttctggaatgattcctttctgatttgttatttgtgtagctttgccatttattaagtttcttttctgatttcctctcttgaattttcctttctctggactaccttgtggagattctaaatcttgtaaaaagaaacttcttactatgtctttgcagcacctaggaggtttcctttggtaaagttcagaagctaaaaatattgtccacttggcatggctaaaattaggtaataagagatctaaaagaatttcttttttaaagagcactatggttaaaagtcagcttaattaagagtggataaacaagctatagatatatttaaaaggcctttatgtttttctcttcttggaacttgtttttttggaaaaagttttttcttctcagccgactgaattatttttctccatttttttctcttttttaatttttttgtcttgccactcttaacgcacacgtgagtccctaagataacttctggtagcctgggactcattgggaaaaacagaggaggcaccacagaacccgttttagggaaaaaaaaaaaaaactgttttccacatgaaaccccaggaattaaaaacagatggatccctctcaaaatcaaagactctgctctgtttttcattgtgttatctgatggttttgagttttggggatatcagaaattacttcacattatgagggagctttagtgtgtaataactagataggaaatatactttaagggatggctaatggtagttatacagggatacttgactctttgcacacttggatccagagaagcatgcttttggtcacccggaagataaggaaacattcctcaccctccactgggagatcagactcccatgaaggacgggctgattacaaaatgggctgattgactttgggttgccttgcaatgaaatgcagggtatggccgggtgccgtggctcgtgcttgtaatccaagcactttgggaggctgcactttgggaggccgaggagggcggatcacttgaggtcagcagtttgagaccagcctggccaacatggtgaaaccccgtctctaagaaaaatacaaaaattagccaggcgtggtggcacatgcctgtaatcccagctacttgagaggctaaggcaggagaatcccttgaacccaggaggcggaggttgcagtgagctgagatagcaccactgcactccagcctgggtgacagagcgagactccgtcttaaaaagaaagaaagaaacaaaaataagaaaagaaatgtagggtagaagcactgtactgtcttctcccgtagtatttctctccttttgggttgcagtataaaatggtgcccttaatttgggagttctgtctttgccttcagctgtgattaagccttagaaatgcatactttcctggccctgttcctccaaaggctccaccctgaagccagtaatctgattaagaaactggcaaataaaaagtcttatcagtgccaaatcttctgtctgtatttacatgtgtttttgtgtgtgtgtgtgtgtgtgtgtgtgtgtgtgtgatgtttataaaagagctctgattaattggcttggaaaataagtgcttaaataaaaaaatattttgtcagaaaaatagaaactttgatgactttttgttcacatgactttagtaatcttttggcaataaagacaattttaaagattattgttaaagtaaaatatcttgaaaatgtagacatttggtctaaattaaggtcagctatcagatttgctaaattctttaaggtcaaactgtttccttgactttggaaaattgttcaatttatttactttggagcattatattatagatgaggcctggggacacgtggagagctatgcccctagctatgctgaaaagagtcagaccttatcttcacttctgtctgatgtcctaggctccatccctagcatataattaaaatagcttttttatcaggtttttcactaaaaatcaaagttgctaagagttaacattgtaacatgaaatcgaggttactggagaaacagttttacatacaaggtgtgtagggaatgtgtttttggtgaaagataataaggcataggaatatggcttttgttgaagagaatgtaattttgtctagttcagaggttttaaagactgtcttaaactaaaagagtaacggaacgaaactgagggtttaagcaaagtgaaaagggtttatacagggttgatcctgaaaaaaaaaattctgtgggtataaacaagttggctaagatttgaaaaaggttatttagctttttctataggttaaaatattaaagtcatactgtggggccagaatctgggcccatgtgtccaaataacagggtcttcttagaaaattgatctgctgtttaatggaaaattataaagcgttctaaaaagtttatgagaatgtcaccttgtggtcaaactaattaaaactggatagatacataaaattttatttaaaaactagctttagcattaaagatgcactaatgcgaacatgaaatttggttttctcttttgaagacgatttttttgtaacgttaaaagataatgaaagggtttggctttctcctttgggtaaatggcaggggaaaaggggagagagaagagacaaattcagttatcctcatgctgtctttattgggtcttgtttggaaagctaagtctcctctgtcagaataaaggtttttcttttaagattttggagttatcgttttggtcaaatgaatgacttatggtgacctgggattctattttgtgatatccagtgttttaaacctttgatatttggcaaactttccaaaatcaaattataaattatgtctctttctggcctaatcttttagatattaggtcctctaaagtccaaaaatgacatttggcgtattttgcataaaaatcatacaggaaacattgtcaaatatgaaatggtgtttggctttttgggggctatatttgtgtaaatatatgattgacatatgttctgagattatgtaaaactcctataattctaatatgacttagtatatgttatcagtaataattgtaattatgttaaatggctatgtgccacagaggtaacaaatttccttgtcgattgtgtctttaactctggctactctacaatgtttgtgtcgtccacaggcaattgttgtctcatttttgtcctcttaaaagatggttttataggccgggcatggtggctcatgcctgtaatcccagcacgttaggaggccgaggtgggcagatcacctgaggtcgggagttcaagaccagcctgaccaacatggagaaaccccatctctactaaaaatacaaaatcattcctgtaatcccagctactcgggagaccgaggcaggagaatcgcttgaacctaggaggcggaggttgcggtgagccaagatcatgccattgcactccagcctgggcaacaagagagaaactctgtctcaaaaaaaaatggttttaataccagctgtaaaatgtaacaggtggtcttaaatgcaggtttctgattaataactctggagattgtgacgttagaatagaaggaaaactttcaaatagaagagtgaatggtgtttggttttctttggactgtatttgtataaatatgttattagtgtgtgttccaaaaattatgggaaacttctataattctgatatgatttcactattaataattataattgttatgtaaaattgttgtgtgccacggaagtaaccaaaattcctagtcaattgtagctttaataatggctgtagacttttgtcatccacagacattttatcttgctttggtccttttcaaaaggcagtttataatcggatataatactctgagtgcaggtcttagataactttaaaaattatgctcttggaatagagggaaaaaacatctaaatgtggcaaactgatgtgttaaacattgctaatccttttgttttcagagtcaacataacttatttctttagagctatttgccacttttaccgagtgagtaaaatacactcagtgacaaattttggagcaaatttgtttctctctacctgatttctctagaatttggaaaccatttgtgagtattctcaatttatgacagtatagttaattgcatacgtgcaataagaatctgttttcttttgtaacaggacaccattggagaaattggtcattttaccaaggctttgactggaatggcatgcttcctttaaagaatcaaagttgacttatagagccatttaaagcccgttggggaatctggcctcataccttgtccacacagagtccctgtacaaggttcctgacctgtggtaagtaaagaatgtcactttctaacaggcccaggaaccccaagttatcttgggacctcaagaggagaggactttggtcaactcataggtatttgagggtacaaacccatggctgggctcggctttcaaaaagtcttatctgagattcttcatggaacagagttccatcaaagccaatttaaaaagcctaagtgaaaaataattattcttgctgcacttcatgcaaataatcaggccaagtacagtaagactaaaatgcattttataagcaaatcatttctatcatgatttgtttttaataaaaatggggactgaacagagaaatattatgcttcaaaagaaaatctatagtaaactattagctattcttgaggttaattcttcagtttagactaaattctaaattgtttgtgggttagaagttcccaaactaatgatttcaaatgtttgcttttaaaattgggaattgtacttctcatcctaggactcattataccttatagtaggctattcacataaacactgtagtaaaactatagatgagagtaataatgtttctgccacgcaagccttggaagcccaattaggcctgcatgaatccactcaaacagttgcaaagcagttccactcttctcaccttggagttcgttcccattcccgctacttcccccatcagcaggaagaagccagagcgatcgacggccttttcccatctttatagcctataccttagggttaaagtgttagaaaacccaaaggaagggattgaaaccacctttgcaaaattaggtctgagacagtgaaaacaatctaacttaactgactccatcttgcttctaacctccaagctgtcttcgttcattcctgggcataggctgaactaactttgggagaaacttagtttacagtttaaagatggtaacagccctttcccagagcaaaattccttcttgcctgggacttgcgtttgtaggactaacatcagccacagtgttagaaattatggtttaggagtcatgcagctggaggcaacaagattctgacccccaccaaactgctcctaagatcagtgcttgagatattttgcagaccctgcacttgatggatcagctggcaccacccagatcaataaactggctcatctgatcttgtggcctccacccaggaactgactcagcgcaagaagacagctccgactccctgtgatttcatctctgaccagtcagcactcctggctcactggcttccccccacccaccaagttatccttaaaaactctgctccccgaatgcttggggagactgatttgagtaataataaaacttcggtctcccgcacagctggctctgagggagttactctttctctattgcaattcccctgtcttgatgaatcggctctgtccaggcagcaggcgagttgaacctcttgggcggtcacagttttgacctagtaaagctttcattttcttgctttgccctatggcctaatttataatatacataaccaaaagccttagcttctagtaaatagtatttattaaagtgctatataaacgttacattttagggtaaccaacttttcttgttttatttttgtttgtttttgtttttcaggaatttctcagttttaaaatttaaagtcccatatcccacaaacctgcttagcccccaggcacaccagacactcgatcaccctaaagttctagtttattttgggatccttgcatcccttaaaattacatacaagatgttgggtatacatacatactgcaattgccatcaggttcaccttgcccactctctagacagagttgatttatcaagacagggaaattgcaatagagaaagagtaattcatgcagagcaggctgtatgggagactggagttttattattactcaaatcagtctccctgagcatttggggaccagggtttttaaggacaatttggtgggtggggagcagccagtggtcagaagtaatgattggttggatcagagatgaaatcatagggagtcaaagctgtcttgccctgagtcagttcctgagtggggggtcataggatgagatgagccagtttattgatctgtgtggtaccagttgatccatcgagtgcagggtctgcaaaacgtctcaagcactgatcttaggctttacaatggtgactttatgcccaggagcaatttggggagaagcagtatcttgtagtctctagctgcatgactactaaaccgtaatttctaatcttttggctattttgttagtcctacaaaggcagtctagtccccaggcaagaaggaggttggttttggggaagggttgtcattgcctttgttttaaaccataagctataaactaagttcctcccaaagttatttcagcttacccccaggaatgagcaaggacagcctggggcttagatgcaagagggagttggttacatcagatctctttcactatttcagttataattttgcaatggtggtttcaatacctgaatgcattttcgtaagacaaagcttcaatgccaaaacatctaagatatcccaatacggtattaattcatttgctcggtattaattcatttgctgttgctataaaacagaatacctgaaactaggttacttatttcaaaaaggaacttatttcttacagttatggaggctcagaatgtatctgcacaataggttcttctttcctgctgcccaggtagagctgatttatcaagacaagggaattgcaatggagagttttatacatgtacagccaccagctaagcagaagatcagagttttactattactcaaatcagtctcctcaagaagtctgaggctagggttttcaagatcggtttggggaaaggcatgtggaaagctacgcaataggtgcttgctgctgactggtagggattgcaatcataggactgtgggcaagggtcctcctgtgcactgagtctcttctgggcggggccacaggagcagttggcaggtgcaggtggagccatcagtcatcagacatgaaatatatctgaacagatatctcaaaaggccaatcttaagttctacaatagtgatgttgtctgcaagagtagttggggaagtcgcgtgtcttgtgacctctggaataatggctggcaatcctgtatgtctacaccgcagcagaatttagtttcccctatcctcctagcctggtggtctctcattagctctacaaacgcggttgagttttggggaagggctattgtcatttaaactataaatgtctcccaaagttagcttggcataagcccaggaataattaagagcagcttgaaggctaaaggcaagagaggagttggctagattagatccctttcacttccatcattttctcaccgttataatttttgcaaagaccatttcaagaagtcccaggtcaaaaggacacatctggtgagggccttcttgctggtgggaactctctacagggtcccaatggcctggggcatcacatggcaggagggctgtgtatgctaacttgctagctcaggtctctcttcttatcaagccaccagtgccattcccatgataatgcattaatccattaactcattaatccattagggcagaactttcatgatccaagtgcctcttaaaggcctcccctctcaatactgccacactgggggttaaattttggaggggataaatagtgaaaccatagcaaccactgaatcaaaggagttaaatgctatttttaaaaatgatgctaaaagacaaaaaaaaaaaatatagtgttaaaagaaaaacttgagccaaattaaagttaaaggagtttaattgagcaatgaacgatttgcgaatcaggcagccctcagaattacagcagattcagagagactccaggggtgccttgtggtcagaataaatttatagacaaaaaaaagtaaagtgacatgtagaaatcggaagtgagatgcagaaacagctggattggttacagctcgctgtttgccttatttgaacacagtttgaacaatcagcagtgtataactggctgaagaatggcggctgggattggccaagactgagtgattgtcacaggcccatactcctaagttagtttttcaatcttgtctacctattgagataggttgtagttcatccacagggactcaaatatagaagtacggagtccttctcaggccgtatttagtttgctttaacaatagactttatgggaaaatggtattttgttaaatgcaaaataataagttagagaaacactttagtgtttataatttttaatattgactgttagccttagctgtttatttatttatttatttatttatttatttatttatttatttgagacagagttttgctctcgttgtccaggatggagtgcggtgatgcgatctcggctcactgcaacctccgcctgccaggttcaagtgattctcctgcctcagcctctcgagtagctaggattacgggcacccgccaccaagcccggctaattttttgtgtttttagtagagacggggtttcaccacattggccaggctggtctcgaactcctgacctcaggtgacccacccacctcagcctcccaaagtgctgggattacaggcatgagccaccacgcccacctgccttagctgtttaatatgtaactcatggcttggtatagttcctgagatttggagaggcaaactgaggtttgaatcctgtcttcaaacttattggcagttgggcctgatcaagttgcttaacatttttgtgactcattctccttacatacaaagtggagaaattttgcctatttttaaatagaattgtacaggacagagaaaaatgtattttaagcctcttagtgctttgtgatatatagcaggcaatatttaaatggtaactattattattgataatagtaagtatgtatttatgtgcttcacagttttacaattaaacatgtccctctcagggtttcttactatattcttacctagagctgtgacatattaaaccaccttgcaccaaaactgaacaattggtatactgaggataaacattacttttttattcagtagatatcactggataattttgttataaatctctgacagtaaagtgaaagattatgtatatcagttaaaactgataaataacattaaaaagaaatttctgaattgaacatcttttgctctaaattttctggccaaatagggatacctcaaaggaaaatggccggtgaatttgtatacagataattaaatagtagttttagtcagtaaatcaggaggtccaaataataagtagaaccagggacatagcatgatggaaattatgctgcccagttttcaaaaacattgatggtaataaacagctgtgtaacataaaagctggtatgagaacttggtcaaattctttttacctgagttgagaaaaggtatcatctccccatattctactccaaactgatgaaatgctcaccgagctgctccgtagcctggctggttacctcactgaaatttcacccttggaggccttatgaccttttaacttattccacagctagattccaccattatccaaatcaatggtgcatttacaggtgattcagaagttatttagagaagattctgacatgttcaataaaaattccaaatttctcaggaattacttttagacatctctaaatgaataacagagaggttatgtgaaatccttgtgtaattatctgtgcccagatttttttgtcgttgtttgtttttggtttttgaaacagagtttcactcttatcgcccaggctggagtgcagtggtgcgatcgtggctcactgcaacctccatctcccaggttcaaatgattctcctacctcagcctcccgagtagctaggattacaggtgcctgcgaccacacctggctaatttttgtatttttagtagagaaggggtttcactatgctgaccaggctagtcttaaactcctgacctcaggtgatccgcctgccttggcctcccaaagtgctgggattacaggcgtgagccaccgcgctgggcctgtgaccagatttcttaaccatcacatgcctttggacttgccattcaatgttccatttagtagattttgatacattgaaaaatcactatgaacacattttcaagtctagctggcttcatttttgtcctctaaatggcactaaatagaatctgtgattgtgacagtgcctttgctttaatctaccagctatttttgaaagatatataacttaattgaaaaatagtacaatcttttcacttagaatctttacgaaaaatgtaaaagatgctttgccagtctgaatagttaattgagtttgactgtaccgggtaagatgcaaaagagtgtgtctatggcaactctttatctcataaaaaatttaaagggcctttatttaatgtgactccttttaaaattcatttaatggcgtaagtaaaactggatatataattagagtctaagataaaagcataataattgaaataagataatatgaagaagctcacacaacaatgattgggcttcaaatgaatatattctttaagctcagctgaactcttgtaagttgtattttttcactatgatgtaataataatggtatgtggatgacaattatactactttataaatgtaaggtgtcttatagtgtactaggatctttcctatgcattatcaaatctgaatctccaattagccctggatatttgtatatccttttttttttttttttttttaatcaggacagagtctcactctgttgcccaggctggagtgaagtggcgtgatctcagctcactgcaaccactgcctcccagatagctgggactacaggcatgtgccaccacacttggctaatttttgtatttttagtggaaacggggtttcaccatgttggccaggcttgttttgaactcctggcctcaagtcatctgccacctcggcctcccaaagtgctgggattacaggtgtgagccaccaagtccggcctgtatgtccattttttagaaaaggaaactgagcacaaagaggttgagtaacttgttcaagatcacataattagtaagtgataaagtcacactcaaacccaggtattctaacttcaagtataatgttcttttctctgtgttccttctttgtataatagagagcaatgagtatgtaggaagggcagaatagctgcacagatctttacaatatgtctcacaataatgctgtgctttcaaaagacttgatttaatcattttgtttcctcattcactggtctattcattcaggctaagggggcccttttttctagatagatttgctttcaccatttcattcccttgtcaatattcgccatcttagaataattgtgttttcattctcccgcttgaaaaaagatgcttaggtaattctttatttaagaagtaaagaaacattatcaatattgatatagatatgaacatatatatatatatatatatatatatatatatatatagagagagagagagagagagagagagagagagagatggatagatacagatatagatacctcaaatccaggaagaaggaactagattttttaattatacaaaaataaaatactcttttttaatttttttcttttaccttttgtgttctttacataagatcaaatgaataaatacatttatttaataaggaagcttattggtagttcctgtagtatttactgtctattaagcatcaacctaggaattgtaccataacttttgtttaaatacaattcttctattgatgcagtaagagctgtcagtcatagtgctgggaatgccagaggggaagtcatccctgacaacattttttattgcactattaatacgtacaagttgacgttcaagtgtgtgtatgtatgtgtgcgtgtacataggcacacagaaacatcatatatacatgtgactacgtaaaaaaatacacttaaacatatctgtttactctgtaagtgaataatcatttatttcaatgtttagatgagattttaacatattagaatggcttcatttttctttctaggcaatctgctagcaggctttttccagcaacctattcttcccccatctttttgatattataccaagatttctgcctccatttttgttgatgtaattatcccggcataattttgaaaaaagatttcctggcaatgtaaatccacaagattgttgatatggcttgagctcaaatgatgcttctatccgatttgtttacctttcagcttgagcagagttcttgtttcataagaaaaacaggaagagatactatagtagagaaggacttttatggatggttttattttaagtaaatattgcctgtaagggatccaggaattttagtgtttttcttggattccttaaccataatacttagcccagagcaaaactttctctcaaatgatggtaaaaaatctaattctattaaatcctgattattctgtgagctaccttggaatacattgcctatgagtttttctgctaagaaatggacttcgtttattgctcattttcccaaaatcaaggaatgctgttgttcttcaatttagatagatgttgacaaggtcctcttcatagcagcaggtgttaggctataattgctcattatagaattatgttttgcttgaaggaactcaggaaacaagaaaagcatgttttctgtgtatatgaattctggttgaaaaattgaaagaatgacactaggaatagtatgtaaattggcagaatttgtcatttcattgtgcaactagtattttaaaaggcaataaatcaacgtgaacatccttgggaaatcagtctccttcttaggcctaacttgcaaagtacccccttaccattgtatttttttaagatagaaattgagattagagcaacacggggagcaaaatattggcagatgaacttgttgaaggagatgaaaaacaagaagctatagaaatagattggccaatagtgctgagcaactactcaactgcaaaaatggcttgcttttccaagcaatgtgtaaagcaattagcaccaacgtttttattagtttacataaaataatattactttgtaaacacctataaacagagattacctagatagcctaagactattattaagtacaataaaacgttactggtttaaagtaataggtatagaactttgtattgtatggtgcacattcacataactagagaggaaatggaggtctacaagtcaaggttgaattacacacttgtaatccatccttaagggaaaaagcttcactgatcaagatggtactttgcacaaccttgccaattgtttcacaaagctgtaatgatgccacaaataatctttcacctcccatacctaagtaaaccatatttgagttattttctctgctccttcctatacctttcctctttggcatcacaaagtcagatttttaacctacaggttgacataagccaaaaatgttggaagattataaactgcctctctttctctcactgtatgtgttgtgtatatgtgtgtgtacacatatataagcacacacatagatagaactcacacggaaacataagcacatatctacgcactgttgttttgctaccatatccagtgataacgtttattttgaattacatgtattttttttctgaatttaagagtgaaatgaaatagagttttgttagatatacagttattacctatataaaaatgattctgtgcatacttccttggcaaagtacaatacctcctccgctgtcactgccaatgcacaggtgttctttctcctggctgttagactcactgggagaacttagaaaaatatttcagccacagctttactctagcctagatcaattaatcactaccttggccttacaatctactaggcagtccttcccaaactctagaatacagcagaatcccctagaatgcttattaaaaatgcagattctaaagccccattctaaatgatattcttctggtaggtctttacaagtcatgtattcctggggtctttctttgagaaacacaactctaaaaggtctttgttattcccattctgggttttgaattctttctcgaaattgtaacaaaatatatgtactgaaatactgttcctctaacaatctgaagaaattttcagcactagcagcacttgttggcactattgttgttattttgtttaatatttaagacaactaaaagttacagtaatttataatgagaatcagtattatggaatcaaccattaacagttcatctcactaaagaatttttatttttattatttatttatttacttacttatttttgagacagagtctggctctgtcgcccaggctggagtgcagtggtgtgatctcggctcactgcaacctccacctctcgggttcaagcgattctcttgcctcagcttcccaagtagctgggattacagctgcccgtcaccacacccggataatttttttttgtatttttagtagagatgggatttcaccatgttggccaggctagtctggaactcctgatctcaggtgatccacccgccttggcctcccaaagtgctgggattacaggcgtgagccaccgctcctggcctcgctaaagaattaacatcatatgttcactagtactgaggttagttcccaaacactgcactaaaaaaatgaatgaaacaaatgaatgaaaatgtgtttccttagccatattctaagaaaatcacctctttgattattgtaattggaaccatctcttctttctttgcctggaatctttgtaacaaggttatcttctttcatgtcccattccaattagtaatcatttatttctattaaggcttttataatcattcggagaatccacactctttgtgtctgcagtcgctgagttcactcattaaatacagaattttcaacaaccctatttccatcttcattgttattaatacttcaaatttgcttctgttcagaaccacgcacttgtaggatcgagtaggtatacgtgttatccgtacacactctgaaaaactccctgcagacacttactgaacaggaattgcttatttaactgtgttttctgtctctttcatacatgttctctctctactgaagtgattgaaggatgacaaaggtccttatgggtgtttgatggcctgtgaatagctgtcggtctacgaattccctgaaaataatttctccacttgtatgaaaataatttactccgtgacttttcatgttgtattgtcaatcttccttctggttgtatcaggcaggagtcattgttttacatttcattctttagggggcctatgcttggatttctcccattgagaaaaaacaaagcataactctgacataatcgttggtgttaatatcatgaaaacctggaaaaactaaaggcaaggcaaaaaatatgcattcttatgcatgctttatgtgcactatgcccgtacataaacctggcagaactttaggcagaattaaaggtttaaatgggcatcatctatcctctataggccttttagtgtgcttcttatgtcctgaggaccataagaagatctaggagctgagtcctacctaccccacattgctggtaccgttgggggctctatgccattctactccagccagcttcctaagattagtctattacttttgtttcctttttttcttttctttttccttccttccttcctttttttttttttttttgacagagtctcactgttttgtccaggctggagtgcagtggtgtgatctcgtctcactgcaacctctgcctcccaggttcaagcgattctcatgcctcaccctcctgagtagctgggattacaggcgcgcaccaccaggcctggctaatttttattttagtagagacgcggtttcatcacattggccaggttggttttgaactcctgacctcaagtgatctgcccgcctcggcctcccaaagtgctaggattataggcatgagccactgcacctggccttattactctcgtttcctagacattattccacccttcctaatacttagctacctacttttgcttccgtttaaccctctgtaacttgttttaaggtggttttttttttttttaaatcctttggctatgtatgttcttataaagcaaaatttagttgtgtcaattcatgaaatcatattagcattcacttagaggagagtgagaaatgtttcctgctcatctatatagcattgcccatttgcacttagttttgatatttgaggcaaatccttcggttttattgtctaaacacacagttgtaattctaaggaattttacaccaggtcgaaggaggtagcattgcccttgcatactattatgtagggcattgtaatatgacatctgtcatatagtgagatgaggatggctacctctttcacttaaaatagctctggccctttatataaccaaagaaaatataactgaaatgcttggcaagaagtaaagttatgaacaatgggcttccagcatttgctgtatgcctgctggcataggaattccaagcatataatgggtgttctttatataatgaaaagccaattgtgagaccggcttataatctttggtgccagtaggcagcatgtacatttcataatttcatcctaatgttttaagtgatacaaaaatgtcctttttatctactaaagtgcttcacatgttaataaatacatgtaaatttctgtaaagtgatattgtcccttaatgaatcaaactgataattgtttctatctcattaaaagtaatctatatttgaaagtgaagaactctacaaataaaaatatttaacatatcaaacatttgaaatttctaggtattgtaagcacaaatatttatggtcatatttggccagaatgttttccttgtaaatagacttggaatttttatatccactattgtgattggctgtaataatttttcaagtactgtatacacaaaattataattacattttatactaactatgggtgggggctgtcaagtgtaggtaaacaccaatttgcctcatcatctcttttgtaaaacctccaaccaccaaacctaatcgagcaagtttatgcctcctctactgcatgttagcactttttccatgttaatgtaatatttgtacacaaacctgtatcatccaacagagcttctgagaagtagagacctttgcttattagactttcagttcttacttcgtagaatggtggttggccattccatacattttattttattttattttattattatttttttctgagatgaagtctctctctgaccccgaggctgaagtgcagtggcgcgatcttggctcactgcaacctccgcctctgaagttcaagcaattctcccacctcagtctcccaagtagctgggactacaggcacttgccaccatgcccggctaatttttgtgtttttagtagagatggggttttgccatgttggccagactggtcttgaactcctgacttcaggtgatccacccacctcagcctcccaaagtgttgggattacaggcatgagccaccgcgtctggccatcaatgcattttaaataaatgaactaaataatgaatatcatttaagtgcaattctgtttacatttgtttacatctatacttattttaatcaagtatattcggtggtgtcaacaatctgtagcttaacaattttaattgaaagactctaattacatatcactatataatagttaaatagttttcttggatgaaacaaaagagagtgagatagagaaagaagtaacaattaaaggatttcattatgtgatagtcttcctgtgtttttttttccttttagaaagttgccgcaataatagaaaatgtttatttctttttcttactagtagaggtggcatttttgctatagagtgagtgcccttagttcttcatttattaacaaatatttcattctatgtataaaaagtataataaaatcatatagacaatgttacatgaaaaatgaacggattgttattacaccaggaaatcactactgtgccctatcaaaatgagtttgaagtatatatgtgcatatatatgtatatatgggcatgaatctaaggcaatcaattatgtctattttcaatgctctgtgaagaaagaaattggttgcctactgtcacattttatcttagtgatactctttcattaaaatgcacacacgaaaaaattaaaaatgtaaaatctgattttctaagtggacttaggaaggtacagggaacaagtgctagtgcgtgaagtggaaagtatgagagtacatgaagttgaaaatgtgtttgtgtgtgtgtgtattgtagcaggtcatctaggactgcaattttcaaccatatgcccaagccccggcatagagatagtgattcagttggtctggggtggggtatgggcttaggtaatattttatggctctctaggtggttctgatgtgtagtaggggcaaagaactgcctctatgggtgtctaggactgtactgtaactatcagcaattagtgagagggttctttgtaatgcctttgattattcttctagagacatatgttctgtacatcagccggggagcaaaaccagggaattccagaagtggttctcccttaagacttactctgacggtgttagtgttttcataactcgagccttaccctcattctaggaaaaattataattattatctatcttactttccaccctcagtacttaacattttaagggatttagtgaatttttccacttccctttttatatttgttgcaggtaagtcctgttgaatatcatcctcaaatacatgcatattttactgccatggtaacattttctactttttcttctatttttttcatatgtaaattatcattgaaaatttggcagagtctctggtaaccaaagtaatcttgtctgtttctgtgctactagttttattataatttgattcctgttccaaaaatgaagtacagtaataataattttttaaaactcaaattatttgtaggtcaatattaatgactttttattaatgtatatgtatataggtttaacaataagtgaagcagcttataacagtatatattctattaagtagaaatttacacataaagttagaagaactccatgtgcagtgtcctcttatgctcatatataactttctgtttcaaataagagtttcaaaactagagtctgtgtggcacagatggtgaattgatgccataatttccaatctgcttgttagtagagatatgtcatatgtttattgatgattgcaagtatgtttggtgcattaaagcttcatatttagtattataaaaaacttaatgtcatgtggggaaagaagttgctacctttctaaaaattgtagaatagccaggctcaatggcgcacgcctgttatcccagcactttgggaggccgaggcgggtggatcaccggaggccaggagttcaagaccagcctggccaacgtggtgaaaccccatctctactaaaaatacaaaaaccagccaggcgtagtggcgcacgcctgtgatcccagctactcgggaggctgaggcaggagaattgcttgaactcgggaggtggaggttgcagtgagccaagatcacaccactgcactccagcctgggcaacagaacgagactccatctttcaaaaataaatagataaataaataaaaacaaaaattgtagaataaactccttgaattccaggaagaaacaaatattgttgtccagttatgcaattatgcataatgagagttaaatgcacaaagtgatcttaaatgtacatattcaaaaatagaggttggatcaagaattcagattattcaatatcaattcaattccttctgttgtgccatttgaatcctattgccaaagatgattattcatcttgaaaaacagactcccaaattcagagttcctgcattttaatttgcccttatgaaaggaaggattctttccttttctggaatacaatcaacttctgctgagaagaaggaaagtctttattcaatactgaaaatgtgtattttcttaccgtctatttatatggacaataatcaaacttttaattatcttctcacaatacttacagatctatgagaagagttgctatctaaagctggatctttatggagaagagacatgctcaagtgtagcgaataatttttgttacatatcagtattaactaagctttgcaaagtgaatagggaaacttatatttaaaatgtcagggaaaaaaagagttttaagtaaaagggacacctggaactctaaagagactatagctctaaacctgtagctgaattctgccttagatttcgttgacccttaactaggggcaaatgcacaccccattctcagggtttcccacacacctctggaaggaacacaggagcgtatttacagctatcgtctaaccattatagaattcctggggacaaagttgtgtcagccacctttgatttgtagtaaacaggtacaaaaccgcatcatggaattatttctgcttatataatcctcttctgcagtgtctgaatcttggcacctcctctccttcctcctaaccactgcaaaaacaacacccagattaaggcatcggggagaactgaatatctgaatatcaagtactccatatatattgatccatcgaatatgcctacaatatcactactaacctacaagtgtaccaggagttacacctgcagtataacagattaaaacagccttctccaaagctcatcactttgaatgttaaaagattcattttccaccacttaaaatctgcatactatgatctgtgtataaaaagctaaaagatatatccaatttcaaatgtaatgtcatgcaagtgtctactgaatgtgtatatatctttgtaagtgtccctgagcaaaataactttcaacttaacattctttttctcttggatataaaagagaataacgtaacaagagcaaatttgcttttaaatttctgccttgatagcaagttaaagtatttagaaccaacatcctcttaaatgtataatttatataacggatgagtctagaacagcatttccaaatggaaattgtaaagaacattgatcccgtaagatgttgaatgaaaaacaaattgttaaaatgtgataatttcatttccttctttagcgagtcacaactcaaccctgaaatgttttgtagttaaaaaaattgtttaacttagtttaacccaatgtttctgaacctacgtcacaaaggaaatgtttttgtcaagtgatacataactttcaaagagattggatttttttttttttttttttgaaatgaagtttcactcttattgcccaggctggaatgcagtggcatgatcttggctcactgcaacctctgcctcccaggttcaagcgattctcctgcttcagcctcccggttagctgggattacaagtgcatgccaccacgcccggctaattttttttgtatttttagtagagaaaggggtttcactatgttggtcaggctggtctcgaactctagacctcaggtgatccacctgcctctgcctcctaaagtgcagcgattacaggcgtgagccaccacgcctggtcgagactggaattttttgaaacacattttcataaatgaattactggggtactctctgtttattaactatgttagtactgacaaagattatttgctcggccaaaatttattcaggcttcccaaccttctcatagcccagtctgtgcacattctcctaaaatttagttttagcaggccagatcagtttagccagaaaacactcatccttggtatttgattatcctggatatctgatcatgttcctcatcatccaccatcctccaggggatgactggactattttcagcaggagtctcccttacccatgatgcttcctcttaataattttccatccactgacccctaccctgttccttggttataaaattcccatttgcctgtgctgtattcaaattgagctcaatctctctcccctactgcaagaccctattttcacggtccctatacctattgagatggtcttgaataaagcctgccttaccgtgattcagcaagtgacattgaataattttttctttaacagtataaggatcgcacattaccatttgttttgaaagatggtataaaaagactaactgaaaactaatcttggctgggtatcactggcagaaattcttggtcttcaatctatgtagaacagatatttgcattttcttttgaaaatttaatacattgattaaattgtcattttgttataaaaatatgaaatgaagggtacatatgatttttaaaaatttctgtccaccatcaccaaccactatgtgaaaatacacctttgtaagactttttctattctataacataccttcaaaaccaagaagaagtatttgtaggaaattcattgcttttatttgtgaattgataaagggaaaataataagctagggctcgagcttcagaacagggtgatggttttatatctctctcaaaagtactgcaaggtaggttgtttcaatactattaacaaccccagggttccctgacatcttctattcccagcttccattctcaaaaattatatcgaggccatgagttggactcctcagccctagcaaaagattattcatttgctctgtaacccttcttgaaccccttttcctggtagctgtgcccaataaatccgacttatatatctttgggagttggagagagagagagagagagagaaagaaagtgagacagagagagatagagggaaattattttagctaagaaaatttacagtcacaataatatgagagtctctgaataagggataaaagaatattagacgagacatagtctctgccaatggtgattaagtaaacatagtcaaggagaatatggctgtgaccattagtgtgtaagtggttacatctggtgggcaatctccagtcataagtaaaataatctacgagtgagatacaggctaagcaaagatttcataattaggaccgaacaagcactaagtacaaagtcaaacactgataaattgagcttcattaaaactaagaattctatctattataatacactaataacagtgaaaagaaaagtcatggactgggagaaaaatattcacaagacgtatatctgattagaaaacttgtatccataatatataataaactcatacatatcaataaaaagacaacccattttttaaaagttggcaaaatatttgaacaggcacttcataaaagaggacaaagatggtaaaaaacatttgaataggtgcctaacttcattagtaatcaaagaattttgaatacccctatatatgcatccgaatggttaaaatataataagacaatatcaagtattggggagaattggtgcctcagctggagctctcaaatattgctggtttaagtgtaaattaatatttgccaatatctactaaatctaaatttatgccttccttatgagccagcaattcctctcatatgtatgtgttcaaaagaaattagtaggccaggtgtagtggatcatgcctgtaatcccagcactttgggaggccaaagtgggagggtcacttgaagccaggagttttagactatcctgggcaacatagtttgacctcatctctacaaaaaaaaaaaataaaataataataatcaaaattagcctgacatggtggcatgcacctgtagtcccagctactccagaggctgagatgagagaatggcttgagcccaggaagttgaggctgcagggagccgtgattgcaccactacactcctgcctgggacagagtcagaccctgtctcaaaaaaggggagaaattaagtccaccaaaatagcatgcacaaggtagttaatagcaacattttgcataatagcagaacctgatataacttgtgtccctcagaattagaattaaaaatgcggtatagactgggcgaggtggctcacgcctgtaatcctagcactttgggaggcccaggagggcggatcacttgagatcaggagtcagagaccagcctggtcaacatagtgaaaccctgtctctactaaaaatacaaaaaattagccgtgtgtggtggcaggcgcctgtaatcccagctactcaggaggctaaggcaggagaatcgcttgaacccaggaggcagaggttgtagtgagctgagatcatgccactgcacttcagcctgggtgacagagcgagactttgtctcaaaaacaaaaacaaaaaacaaacaaaaaacaaaaattgggtatatccgtggaatattatatagtaataaaaacctgctacttggaagaatatgaacgaacttcataaacacaatgttgactagaagatgaacatttactgtgtgattccatctatatgaagtttgagaactggccaaagttatctataatgattcaggtcagcagagcagtttcttcctgagaggctggtgggaatatagtgtgaattgggaaagagcatgaaggagacttacagggtgctgcaattgttcagaactctttttccttgatacttgcttacagaaatgtgcagaatttttatttcacctagttttctatgcatgcgtagaatctccatagaacacacattttattaagtacgcattcaacttcttctaaaatacctctagtcatagaaaatgtaactttatttctttattccttactttgcctagcccaagctcctacaaaaaaaaagattagttaccatttaattcaaattataaaacagaaccagtcttttaaacagtatcggatacacaagtatctaatctaacttccattgcctatcagtggatgtggctttaatcaagtcttttctaaacaagatggacaggcactgaagaaaaaaaaagtgagccattttatgtgttttaaaatgataatgtgattttgaattttgctattgtagaagctcctaacaatattatctggcatttgttctatctgaataaagccatggcttatattatgtatatatggaatttcccagaatactattgttagacacatcactgagctgtgaaaaaaaaaatcatctctaatttgatcaatatgtacttacacgtatatcattagttgccattgctctcagcctttagtacattttttatgagccccgtgggccatgagcttgctttttcataacagagaacgagaaagaagaaatctcatcagtataataatacccacatcagtagagggcatggttcagaggcaatcttgttgtctgtcacagactccatgatataagctagaaatgataaagagattcgttacaggatactgtaaaagggatattatggtatataaactcattaagtgttaactagatcaaagcaaatatggcagaaaagagtctctgaatactgtagcagagtttattgaatgaatgaacgaacgaatgaatgaatgaatttataaaaagcgcaggggggccggggcgcggtggctcacacctgtaatcccagcactttgggaggctgaggcagacggatcatctgaggtcaggagttagagaccagcctggcaaacatggtaaaaccccgtctctactaaaaatacaaaaaattagccgggcatggtggcgcatgcctgtagtcccagctacttgggaggctgaggcaggagaatcgcttgaaccctggagacagtggttgcagtgagccgagatcgtgccactacactccagcctgggcaaagagagcaaaactccgtctcgaaaagaaaagaaaaaagaaaagaaaaagaaaaaaaaaagagcgcaggggtcagataattgagttagaaggtagaggagtggggatgttaatgcccatgtgagaaaagaggaagaggtattgaaggaatccagcggactttgatgaggaccatgcgggactttctattttcaggaacctaagggaacatcttgctgtaggcagcctggggctgtctccatcaaagaaatgctaatatttacattcattggtttttgttatgtgactgtctatgtgctaaagctgtggttctcaaagtatgtttcagacccgcaatatcacctggaaatttgtaagaaatgtaaattctcgggctgtgcggagacctactagataatgaattctgggagaggtattataagaagttcttcaggggattttgatatagtctctaggttgagagacagtgtagtagacaatacattcattactttatttattcttctccatgattctataaaagagctattgttactgctttgtttacaaatgagaaaactgaggctttgaaagaggctcagtattttgttcaaggtcatatagctggtatccagagatactgggaatagaacccaaatttgtcagactataaaacacggtgctttcagccactcctccagagccagggggataaaaattcattaatttccatgagtatttgtaatagtagcccgcaagtcctggaatacaattataactgctacagcattacctttgaggagaaaatatctcatttccccaattgattgccaaaataaaatgcttaaaatacaaatgtctggttgaagaaaccctttaattttttttcttgcgttcaggcatttgtgtcaggtttaactaatttattttaacttgcaatacagtgttgcctgtagtaacaaataggacattctgctattagtttttaatctcctaccgacttgttattttccactcctgaagctaaacttctttaacaatttctatgctcattgtatctacttccttactcacgtagctacctcaaacaccaataatccggctgcttccacatccttcaactgaaattgattttgtcacggcccaagtcacatcaggcctcatcttaccactctgtagtattgattgttgatcggtccttcctattggaaaaactcttcttccctggcttctaagatattccactattctagttttcctgtctcagggcaactttatcattttcttggagggttgctctcctatcgtaaatctcttttaacgttgagcttcaatcttaatgctcaatcaacatatttttcttgatctcatcaaaatccatagcaataacaactcttaaccatgaccctcagatttttatatccaaccaaaatcattcttttgagctagagacctatccccctgcccatcagttatgctcatgtatgtcacatagttaattcaaaatcagtatatatgagatcaaaaactgccttctaagcaattcttcctccttctctagctcattgaaagacatcatgtgccaaacttctcaggtttgggggtatcattcttgcattctccctcgagatcactgttctaacattaccttggcatcagccatcatgttttgccaggattgttgcagttcccctaaaacagatgttcaatttcccccacccctgtgattcagttttccacatgcagccagaatgttttaaaaagcatattcgattgtgtcatcttccccctagaaaaccttctgcggtttcttcaaaataaatttaactgaataactagttgacttaattcaatgttttccttcgtcacactaattaatcagtattttcatggtcctcgatgctgagggcttaacattcaagaataaatttgtcttatgtttactttaacttataaacttcctttaaatgaaaactaattgttaaatgatttgcaaaataaccagaggcacaaagtctattgtgatcagtggatatgacagaatatattttttgttgttataccatcactttcacaaaactatggaatatatatataggcatataggtgtgtatgtatatatatgtatagatatgtgtatagagacataatttatagaaacattcgtaataaacccctgccaaacatattttgcacgtttgaaatattagttgattggatttgtggtttgtatgtaagttgaacaattaactgatgtgatcattctgtttccatggctgttaccttagtttataccaccttttcacctgagtgattacaatagcctcctgattccttgtctctttatttgccacgttcccttcttcaaacttcccaaatccactttcccaattgttatcaaaaagagttttcctaaaatgtaagtcagataatgctactcattatgccaaattctcattgccccaaaagtgaaatctgaattctataagatgctctaccaatctctccattaattggcctctgcactatctctttacattcaccccttcccacccaccgaacccacccatccctcaagaacgacattgtacgtactaatcatgtcatacaagtcactattctagcttctgttattcttctggaaatgtcatctcccacctcaactttttacccagctaactccagtttatcatttaggtgatgtctcctttttggaacatacctagaattgacgttacaggaggaatatctcttgtgtgtcatctcaacatcccacagtaactatttttttttctttttgttttctttctttcttttctttttttgagatggagtcttgctctgtcacccaggctggagtgcagtggtgtgatctcggctcactgcaacctccgcctcccgagttcaagcgattcttctgtctcagcctcccgagtagctgggactacaggtgcgtgccaccatgcccggctaatttttgtatttttttagtagagacggagtttcaccatattggccaggctggtctcgaactcctgacctcgtgatccgcccgcctcagcctcccaaagttatgggattacaggcatgagccaccgcgcccggcccacagtaactatgttttaacatacatcaaaccactttgcaatttcctgtttacatgtcattatccctcattagtaagcttctaaaaagtatgggcatttatccagttccctatcatctccctagtccccagcacaatgcctgacacttaagtaattacgtgagtaattaaatgagtaattatgacacattcaagcttgttaaactctaaaacttggaaataaggcaaaagaacaagtagatgttcttttattatcatactaaaaagtattgtctaaaagatctaccgacagatagtttaatttgttagggacatgcgtctttgtataacttagtactaacttaaaagataatttttttgtgggtacatagtaggtgcatataatttggaagcacatgagatattttgatacagacatacaatgcatagttatcacatcagaataaatggggcatctattaccttaagcatttatcctttgtgttacaaacaatccagttatactcttagttatttaaaaatgtacaagtaagttattattgactatagtcaccctatagtatttactattgattagggcttagattctgagaaattttacataaatgtacacatttttgttcagtagagagacaagtaatatctttctggcaccctcaaaatatataattttattgcactttttgatgttaatctgttttgtttctaacttagcaatcttgttctagcttctttttctttctgtgactatgtgtgttcagtcccttgaattcccctttgaatcagttttaatttgttgcctgttttgttattagttagttgaataaatgtttccatattatcaggatatgtttataagggaacagcaaatttacttccgtgtgttttaaactatatgagaaacactgagcttggcatcaatagctaattctaggggagaaaaaaagtcattctcgtatatatttggaaaaacagtttttattcctttttgagatattaacagccatttgtatgttgaagattctgagaaacttggaggtgatttaatctgttttgctttgtttaatctaaaatttcaagattattttggttctaggaaattttgctctagaaaaaacagtttggaaacattggtttacttatagctttaaagaacaatattttaaactacaattcttgtgttcgaaatgctgtaaaaatcatttctattaagatttatttcctctaagtgttttgcattcaaataaggtgaaattctgggtctccaaatatacatttcagaaaagtctttgtttagctgtagggaaggcatcctgacttctcatcattatagtcacatagatacactagatttaaaggatatttaggtcgggcgcggtgactcacacttgtaatcccagcactttgggaggccgaggcgggcagatcacctgaggtcaggagttcgagactggcctggccaacatggtaaaaccccgtctctactaaaaatacaaaaattagctgggcgtggtggcacttgcctgtagtcccaacttcttgggaggctgaggcaggagagttgcttgaacccaggaagcggaggttgcagtgagttgagatcgtgccactgaacttccagcctggggaacagagccggtctccgtctcaaaaaaaaaaaaaaaaaaatagagcgtaattatatattttccttattttaaaagggaaaaaatactttccttattttccatatagagtatatcaaaataattacaatcattaagtaaaactaacatttacctgtggtctaaaaaagtcggttgaggccaggcgcaggggctcactcctgtaatcccagcacttcgggagttagaggccagtggatcacttgaagacaggagtttgagaccagcctagccaacgtgatgaaaccccttctctactaaaaatacaacaattagccaggcgtggtggtgggtgcctctaatcccagctacttaggaggctgaggcagaagaatcgcttggacccaggaggaggaggttgcagtgagccgagattgaaacactgcactccagcctgggcgatagagggagattcagtctcaaaaaaaaaaaaaaaaagaaaagtcagttgagatagtgaagatccaaagatatctgctaaaaaagtgtgtgttatctagttttaaaaagaaatgatatgcaaataaaaacattagtgagcagttaaatatttaaagggtacgttacttacattatgggtgtaaagtgtaagtggatttctgaaaacatgagcaccatgtgaacttcagtatttaaacaagtttattgcttttggcttttggatttattgtttttttgaaaatgggtctgagaacggcctagaagaatgggtagacttgacatctaagtctatctcaattctgctcttgagaaaagaggaagaaattgctcagaatgttctatcataattttcttcttgctctttagatttctaaatggctacacaggtattgagaaacacatttttatcttgttatgaacactaaaattcattagccttatatttcctctttccttatagctgtgtcttgtttttgatggcttaacacttttccattctaatcaagctttgtcatgggctatgggctgaagtgccttgtgatggactgatttactttcagtccctgtaatctgtgcccttgaaggctagaggttgaaatcattaaggctctgctgttgcccttgatctctgctcaaagaggctagagattgattggttgacagtggttgacctggacgtctcaaaatgaagccgtgatgaaggaaaatcaagtacacacgttcagaatatttcataatgacatttattctgcgtgcattttttccagcggtatttttgcttctttttttaaaaaaaatctagtttaatcatttctagcccaccctcaccactaccacatgtttattccatttctacattctggggcacttaagaccttttaattccttgaattagtcatttataaatgttgtctgaatattctatcaaagcaaggcagcatagagaacttattattacacacttatcacatgaaaaaattatttattagcaaatatctattcagagcaaacattttgatcaaagttggcctcaattcactaattagttattatgcaaacataacaaacatccaatagaataaatattcactcttttctacagttttttttggaatggtttcagtgctggaaaaaaaaactaaaccaattcatgtaagaaaaagtaaatgtctgttaagagaaaagaccacttttaaatacacgttttaatatttctattttaatttctacttaaaaaggttaaggaggaatattctaaagacgaatatatttgcaaatactgtgggaacactttattgaaccaatttgagaactaagtcaattatattgaatttacatatttggttaaagaaaaaatgagaagtgattagattagttcaatatttaagtgaacttaacagaagtatccaagttcatgttgaccctattgcttcgtattaatattgataattacaaatatacatatatattaattttcaaaaatatagattatgagtgggtaataatagcttctaaaaattcactttggtactattccatagtggccaagtttccttttgttctctggagggaggtggcctaatttaggcaagtttagtatttagagcaaaaaaaaaggcagtctatgcagagattcaatggcatcttaaacctgccccacctatctctcattttttacattgctttttcattatcttttcctttcctttcgagagacttgaatttaatattgtctctcttttccccatgtttgccttttataaatctaagcatttctgccattaatactgtaggttaagaaagtggcagccaccatatttaaggaatagtaaaatctgtaactggggaaatatacagtcttctgagaaactgaaataaatttcaggtaaaaagtatgtgacgtcaattgagtggtgcacgtcgagggatacaaacctaaatacattccaggatgaaaatcgtgataagtttggagctccattttcagggaagtttctgtactgactttagaaacattgcaaccaaacaaatccttgggaactgtagaaaggactctttttagtgttcaggctaagtagacaatgcctacatatttaaagtttcatttggcagacttgacacagtaggcttcatggaacacaagttatgccttccttggtctgagagagagaagactagttctgctcaactgaagttaagatctgaggttcagtgagtccatatagatatcatggaagattgagtgaatacactggccctaaagcaacagaaagagcacaagttgagatacagttttaatccccaatgattggaatcaccactgccagatatcacatcctaattacacattctgcccttcaagctctggcaatacttttcttgcggtgccccctttctttagtttgccatatgaagagtgtggtaattactttccctgcagttgtttaccagttctcattcatttttcaagttttcctttctctctctctccttttttttttttttttttttttttagatggggagtctcgctctgtcagccaggctggagtgcagtagcatgatctcggctcactgcaacctccacctcccgggttcaagcgattctcctgccctcagcctcccgaatagctaggactacaggtgcatgccaccatgcccagctaatttttcttgtatttttagtagagacgggatttcaccatgttgggcacgctggtcttgaactcctgacctcaggtgatccacccgcctcggcctcccaaagtgctgggattacaagtgtgagccaccgctcccagtcgaatttttctttctctaaacaattttcagtgtaaaggtctgctgtgctataaatttgtgacacatgattgtgttgtagttacgactacgtaaggctctatggacaggtttcctttagttctgccagcacagctaaccagctaatataaatataaagaaatgcaactgttgacaccaaatgcagtttccgtttgcctgaacaatcaacaaataaacacaaaatctgaataaacattacaatgtgaatctatgtgtctgtatccataattatataaaattgaattattctaaagaattctatgtttcttaacaaaaatattatatgcatatatacagttaggtttaatagatttgtataagcatttctaattcttagcttccattgatcttcagtgtttcagaatatttatttcaaatcacttttggaagaaagtaagtttacaaattgtgaaaataatacacaaatcagagatccctatttaaaactaatccctacatcgcttcatcaaaatgcctaaaattcttttttggaatgaaattcacagagaattgcaagattcatttcctttacacttttattcactgccaataacttggggatactaagagtgcaggagaagcaggtaattctgagggcgttttggaggaaagcagttttgcattggctaagtttttaaaaaagattaaacatttaagtgccttgttttaaagatttgaatgataatgatttcaggtaattgatttttaagctatatggtaataataagacaaaaataattcatttgtttccttttggaaaatagattttttaaaagataaagatctgttttaatttttgtttttatttctaaggtactgtccaacctaaaaatatgaaagtaggtgtgcataagcttttttaaaaaaaaatcgccagtagtacaaacaaattttatagtccatcatttgcagggctggagggcttgccatatttaaatgtgtgacctgttttgagtatttgggtcaaagagaagggaggcaccagtgtttaaagtggcacaaacagagggaagaatgaaaatacaatcgaatatattcatttttattttcataaataaaagaaagtttaaaaaatctaggtacatcagtaatgttcccttagatagtattattatgtggctattgtttactctcctttgtcagcaacacgatcagtgattttcagcacctgctattgggttaataatggagttagagaagcatgagtttcaatttgtgctcatctactgcaaagtagctatatgaacttgggcagttacttaacctcgctaagctttgtttcctatccatacaatagggtcaagagaagtacctctcttacaaggtctgtgaaaatgaagtatgttcatgtgtttaaagtgtttagtaggtggcacatagtaagcactcaaattatatggactatggccattaccttgacaaactatattctctctccatttcctcatatgtaatgtggattaacacgaagattaaacttaaaaagtgcataaaaatctcagtgtctagcaatttgtagatgttcaacattattaaaattccctcctcaattttgcttactttgctgtactgaatgctatgtgagataggaaaggatatcaattatttgctatgccccttccgggcactaaataaatacatgtttttgttcattcttttactcaatctaaaagttattgagcaccaaataggcatcaggaagtatatggacaagtataggaaacaggattgatatttacaatcaggagaacaattttgagcccccagtcagtcacttgatgttatcctgggcaatcaatggatagagtccaaccactctaagcctcagttttcttatttctacatgttgatagtattaatagttgttataagatttgaaacctgttatggactatagtattttgtgcagacattagtcaaaatcataaattattttggggagcacatttacattcctcacagtgaagccttgggccctacacctttgcactaaattatacatctgtagcaggaaaaaaaaatttcagtatcacacaaatttaagtgggctaaaaatggtattttattaatttttctatagctaaattaaatttctattttggttcctcttttaatttaacaggtttcttaatataccattctcaggaaatcttaataaaattcagtgacttttcaggtctaccggtcacattcaggagttgttaggactctagcctccactctaggattggaataacacaggagtattacttagcttcatggcatcagggccaacttctgattctaggtcaaggacacacagagatgtgacatccaatgtggtctgtggggaagaagatctttgcatgcaggcattggctgaagtgaaccagtacctgcatcccgcccttagttgaactgcctattctgcctccaggatttggggtgtctgtgtcctgattaccacacccttgaaagactgccagcttgctcctcctaacttccatgaccttctcaagcaccgacacatgttagctgcttatcacaaacctgatgagatgctcagacccctgtgaggctaatctacatgcccagtccctttgctctggttgggcactatttttcagcagctccagaacctccttctcttctttaggactttggttccctaagaggacattataatgttcctcttatttgaaaaggtgtgtgtgtgtgtgtcagagggtcaggaccctccccacacccccacacggcttctagctctcacttatctgtaactctctcaacttccccctcttcttctcttggtaggcacctagagcaggtaaaaacttttaaacaggattcttctatatctgtttatgccagaatcatggttcacttacactaaaagcagttgacctctgtcagtgaaatcaagagttgattttgtaattcaagagctctgtatttataaacaaccctaaggcagtgaggaaacagtgcctaacttaccttacttgcaaaggatggaacttaagaatgtggttacaatctcacgaaatacttgtgtgtgtgtgtgtgtgtgtgtgtacgcacctgtgtgtgtgtagttctgaagatggcattgttaggtggtggaggcctataatattatgattctcaacatgtgaattgttatcacaggcaactaatcctattgcctcaggtttacaatctgtaaatgggaaataaaatgcctaatgtttgttctcagcctagttgtgaggattaaatgcaaaatacagcctcaacaaatgtgagttcccttcctcacattcccttgtaaaaaaaggactttccccaccccccttttatttagcatatcaacaattactcctttatttgggactgaacagccttttactaactatccttttgtttctcattttttatattcatgcatagtacaacttatgaaatattttaccccaaatcctcttgggtctgctttatatgcataaccaaataaggcatatttttatacaactattgtgttttatcttaaggtaaatttcaagctaaagtgaaaaatgaattccttctggtattcaggcagaattttccttacgagaagtaggtcaagaaacattgaacgcagaataaatttatctctgaatacggctcttcagctctggattgtttaaggatggcctagaatctacgctgagcattctcttgcatctcctttttcagtatggttctgaattagcactcgggcataaagcatttccttggaattgctcttatttttgtccccatattctgcactccatcgtcaggtaagaaggcaatatgtagcagtcatttaagaaaccagcacataaattatttccgaagttaaatcaatgtgcatcttactggttcagttcacagttaactagaactgctggggcttgcttttatgaattgtcccattccctccttgctttctttttgagactgactcttgctctgtcacccaggctggagtacagtggtgcgatctcagctcactgcaacctcctcctcccgggttcaagtgattctcctgcctaagcctccctagtagctgggattacaggcatgcaccaccacgcccggctaatttttgtatttttagtagagacggggtttcaccacgttggccaggctggtcttgaactcctgacctcaagtgatccacctgcctcggcttcccaaagtactgggattacaggcatgagccactgcgcctgggctctctcttttaaacaatcataaatatgaaattaaatgggctgactggaagcaaattggtctgtaggaacgcccatgaaagtgttccattctgattgttttcccatcctgcagcccctctggcctagtggaagctcctttcgttttgcagatttagattaactggggtaggtgagagagggcagggatggcaggccatttgtctctcatcaccgactgaaaagttgagcctaatatataccttttgctcctctacccaaatgaattacaaaattctaattccctcacacaccggggcctgttgtggggtggggggaggggggagggatagcattaggagatatacctaatgttaaatgacgagttaatgggtgcagcacaccaacatggcacatgtatacatatgtaataaacctgcacgttgtgcacatgtaccctaaaacctaaagtataataataaaaaaaagagttgattgtttttataatctaaaagtaaagacagtttggttttgtcaaaacttctttgttttctatttattttctctatagcttctaaatttgtgttctgcttgtgcatgcgtgtatgcttgcatgcatatgtgtgtgtgttttccttaaagagtaggcaaaaaagggcagaaaatagatcattcccttataaacctgacaagtacctgtttgtttctttcactgtggtaactggaaggctggaaatactgagcacttcagtagtcattctaaaaagattggttcatgtttaatttgtttgactgcccaaacctctaatggttcagtgaaaccttcgtgaggattttaagaaatagatcaggtgatagtttcagttgaagctactaaaaaaagcctttttgttcatattattttattagagtgggaaattgggaattctaaaatgttcccacatttgtcacccgtgttactctggcagccttttgtcatgttcacattttccctgttcgtttgttactgctgctgaatgtactttaatgattctaataggagctatagattgtgcagaagaataacaagcttcaaattaaaaaagaatatatttgcattttgtggcttctaaatattaatacaattgaattgtttttgttgaccactgtacattgacttcccagggtccggtgcatagcaaattcatagatgctccataaaataattatagaaccatgcattcgtgtgtgctgtgttgtggttctgggtactaaggatgtctgcctgagtcctgaatgagtcttaatctccatccaagttgtgtgtttcagagttgggatggtgcaaggaatttgattattaatgtaaactttagataactcatagcatgaataacaactgtacagtagaagaaaaatgcagaaagaataaaaaacacaaacaacagctaaaacaacaacacataaaaaacctcaaataattagagcaacaggctgtgaatgcatttagcaaacatatacccttcacttacttttgggaatccagtaactttctcctctgagttcaatgaaaaatcagtagcacttacgggtgtgatcattaactttgtttacttttttagctttcaatgacattcacgtttgtgttgagatttgttttttctttcctgaacattttatcccattcgccaatccagaaatgatagaataggaaaagaacaactagggctttatgcaagtacagtaaaatctattgatgcccctctacaaaaggctgcaaattggaatggctgaaatcatctgctcgtcttttgtgttgcattttaggactatcaatgaaacttgaaatgatatattaatagaaagtttgaacaggaattatatattgaaaatgtgacagaatgggtagatccaatcatcctaggctgttgagaagggaatatgcctcacagtcttgtactttttagatgaagccttccaatttacctggcagcccacctcatggctcagtgtttagtcatatagcagaggttgttacaattacaaaagttctcttttttttccatggaaaattgatcatttggagcagtagattaatttatttcaattttaaagtatgagaggcatagaggtacattaaaaagaacaaagactttgtagtcagagacatctaagagttgtgtaaacctgagcacataagtagcattttcttatctatatgatgggatggggttggggtaagaatatatatcatataggcagttacaaatataaaccacacatcacgtatggattttttttttagatgaactcatttatttgacatattaaattagacaaagaaatatatatgtaaccagataaaaacaatcacattctcatactacttgaacacaccgcagtggtcaaaaataatggattgtaaaatggaccccaggatttaatgcaaaaaccaccccatacgagaaaagtttcaggcttctaacttcactgaatccagtactaaacgtgcttctttatattcctcagcttcttccaagtctttttcactttctaatatctgttgaagatccaaatatgcggcttccaacctgcgctggcaatctgggatcatcatccgggattcttgtaggatctctgcctgctttttgatgtcataattttcaccatcttcagctctcattttttcaatcttttcttcttgttgttttgcctctttttcatacatcactttttatttgaccaaccgcttcaccacaccggtcttgatcttgatctgtctcacgcgaggatcggccatggtccctcgagccccgcgagaaggaggggcggaaagccggggtaaccgtggagggcgacgcgcagaggcggtagctatttaggcttggtcgccggcgcgcatgcgcaggctgcgcggccacttaaggagtttttataataaatcattatagtgtcataccttccatcaaaggattgagtactcaggtgtgaacattggtaaacaatttttccaatattaacatctgtagtattttaaattatgtgtcattttaaggtactgttattctctttgtaatttaacattttttataatagaaataattttgcaattgctacattaacattttgagttgattattgcttattgttagcaattccattgcatcattttacagattccatcactgtgctgaaacatcccatctgtttgtgaaagttttggatgttttctttagtatctagatgaatctattccttatcttatcagtcagagatattttaaagtccttgtctgttagttcaagcatataggttatctcttagtctggttatgttgatggctttacttcttgataatgggtgtattttgcttagttttatttattttttgcaagtctcattttctttttagtgaatgttagatgtcatgtatagaagaaaaatagagaatgaggtaaatatgtttaatcttggaaataggtatagctttttttctgtcatactgctagtatggggtttgagtcagtggtgttagtattgagctggtttggaggggcgggggttgttgttgctgtagcaaccttcagaacactacagtcttcaaagacctccactgatgggctgctgctatcccgtgcttaatgtaatagtgtctgcggtcctaaagggatttctatcttcttgttccatcctcagttttcagcaagccttatatgcctgtctctcccctagtggtaacagatcattctgtttttattggtgcagaatcctgggccaaagaggttatcatactgctcttccaaagagggtatcttgaccctctctcagtggcttctaccttccccaacccctctgaacaggcgggtcccatgggtggtagagtttagtatctttccttcagtttagtatctttccttaaatcttacgccttttagaagaggagggtctggaaaatgggtttgacttcatgtttgtgtgtcactgaggggagcttcttcctatctcttgtcctacgccttacttttttgcaagttcccaatagaagtttgtggaaaagaattccagaatgagtgcagactccttcggtctgcatttccaaggatgctgaaatgtcataccagcccacacctgacttttaagaatgccttacaattggagctattttctttttcctgctcctacgatgactacttcttcctccagttccctgccaaaggtaaacctttcatgtatccagtctctccttggaggagattgaagtactttggctcacctcgttgccttgtggccacagctatataaatggctcaaaaaataatacgtttttatagatcaccctgctttttctcattgggtggagcaacgttcttatatagcatttttacatcctaagcagaagaggaacttgattatgatggaaagcgtaagtattttaccctcttgggatatccacattcgacatgttaatcattacagttacccttactttagatggaaacaatgaataatacttatttttattagagaaaggccgtagtagataagtgatattttaaaaattgaatttaataaaaatgtattgaggacctgttatctgtgaatcacccaatgggaaaagtcatgaaaagctgaagaaaacacttcattgtatttcagagcttttaatttaaaggtgaagaaaaaaggtgactcaaaagcattttgtatattcagaatccatttgtgaaacctaatttgtgatgttgaaactgagatttggcacactgtccaaaattgcattcaaaagtgtagaacctgctgtcctggcctttttgttttgtttgtttgtttggtggggtggggtggggtgggcgtaggaaggaaaaagaaaagataaggagtgtggtattgactgatagtttattctcaagtgcagtcaccagggagttcgaactgacttctacttttgaagttgaaacatggaagcagggctccaaaattttgtatctcattgaagtaacttagaatactcacacttttatgaatgattgagatacttcctaaaaatttaaaccatgatatctccaacaacggaaaagagggaatatgaaacccccataggctacgggtgtcaatcaaaatagtcttcggagaaatgaaatgttttcttcatttactataaaattgaagaaaaaatttcatttttcttttttttcttttttgagacgaagcctcgctctgtcacccaggctggagtgcagtgacgcgatcttggctcactgcaacttctgcctcctgggttcatgcgattctcctgcctgagacttgcgagtagctgggattacaggtgcatgccaccatgcccggctaatttttgtgttttttagtagagacggggtttcgccatgttggccaagctggtctcgaactcctgacctcaagtgattcacccacctcagctcctagagtgctgggattacagatgtgagtcaccgtgcccagccaaaaggttcatttctcaagttttacaaaacttttcagtcaaaattcacatatctactgtcacataattcatactcaattacattccttcaaaaatgctctcacacaaagtttgaacacatcgaggcaggtggtttgaaacatccatcccaaagttgagctgggagtcaaggtgacaagaatggcccatgagcagtgagatgtctaccaatgccgggctccggggcaaacaactaacattaagtgcaaaggattaaacttgttaattaggagaaaataaaagcaggcatttgcttattttattattgagtttatattaatagtaatcacttccattcatattagatgcaaaggaacttttaatattctatgcactgacttaaacttatttcttaatccctttcatctccttataatgatgcatatgagattattggaggtttggaggtatgcactaatgcaaagtgatgagctgtaaccaaaaagtaaccaagaaaataaaatcacaatttcatgcatgtatttatatttgtcttctatggcaaaccatggggatattgaaatatgaaatttcaaataccctctttattatgttagatgcattatttttaacaatagaagccttaaataaaatattaagatacatttgtattttgacacttaactgcccttggcattgtgcatttaaacttttggtgtctagcaaagttaaagggagactgtctttaaatacatatatattgatagtgccattttgttagacatgtcatctttcgaatgtaatgatattgttcacacattgattttattgatgatgttaaatcaaaatggtttctgcaattagtaacttctataaaacaaacatattaaaaggaaatcatacttcctattgtagtataccaatttatttttccatttaggaatagctatgctccctctcatgttttgttttgtataccttactaaattaaatattcattttattctttaccagtttccatcacagacacaatcagtattatttaaatttcagcaagaaactaaacaagacttacaagtttttcagtgctaatgatttttttttctcattaagtctgagtctaatgaaactaaacagaaagttctggttggattccttggtcacccctatctgtgtttgtgaattcctataattggcatgaattgaaagttcttgttatcactgatagtaacccagagacaattccaatttgggtttaaatggccctatgcagacaagggtaactgaacaaaccaaaacagcttcatgtgtttatggcagataaataccaattaagtactagaaatgacatcagggttttttttttttcctgtatagtttcaagttaagagactttttctcccttgagtttgcagatatagagcatcatgaccttacaagaggaaggagagcaacttcccatctgaatgagagatggaaaaattatatgaaatagaactaattctactgttaagcagtaaactacttattacttgagtattaattaggacacttggctacaaataacttataccaaatttgaactatctttatcaaatgtggaatttattccaaaggatacgtttattctaaggattaaaatgtttctcaaggcaggttagggcaaattgcagtacacctcagaaaatgcaatcaaaaccttccaggactctctgtcacatctccttctctctaaactatcttttttattgcagattggcttccgctgttcctcatgtagcagaccatgattgccaacattcccttatatttatatctcgcagttgaaggattcagggagagcctgattctaagacccaagtctaaattctttaaatacatacgtatgtatgtgtatatgtatatgtatgtatatatatatatacacacacatgcattcatgtttagatagacatacacagacatatatgtgaattacattgaattacatatgaattacatttctatttaatgtattcaatgtaggttacaatgcaacgttatagaccttttcatccattacaggtaggaatgtggtttaatatggaatttttgagaagtaatttgaaaatatgtaccaaaacttacggagatgatttttcacctaaatccattataatttttgagactcttttctaaggtaataatcccacatttgggtggaggctttatctatattgatagtaattgcaagactattttaatagcaaaaattatgagaccatttttcaaggttccaaaaaaaagcagaacggtaatttttatgggaacaaagaagacaatgcttctagatatttaaattgtgtttgaacaacattggaaaacctgttattttaaatgaagaaagtaaggtgtctaactacttgtgcaatgcaattacaattatgcaaggaaaatgcaaaggaaatatatcaaactttaaatcctaaagcttttaatactcactttttctctagtttctaaaatttggctaataaacataaatttaatttataaattaattgaccttggcattgtataaacatcagggtaaataatgcatctgtctctctgtctctctctcgctctctttattcaactttatcctaaagcatcatactaattacaatctattggttttagtttgactcctcagctaggttactcaaacaatgaaagactacttttaatctctgaagatgtttctttatcttgaattttgatttcctaatcaatgaatacttgtctaaatttagtattaagttcacacacatcttttctcttttttggattactttgccaatcaataatgttcctcttttagcggttactggttatttctactgatctctgctgagagtttattctcagacactttcataccacgctttgaaaatactggtttccaagctgtgaattcactgtatctatgcagaaaggagtgatttgtttcttgtatggcatgatgttttttatatcctgtgaaaaccatcaattccacatttgagtggttccttcatgacatgggctgctctaactaaagaaaaatgtgcattaaaaatatgtgtccgattaaggcattaaaatatcttaagcagtcaggtagcaaacaaatctttctgagttccaattactgtattacattatgtcaatacttactgtcaaagtacattacagaaaaaggctgggctcttttcagaaagggcattgcaatataatgggtgacaagaaactgcatctgtgtatatggaagcacaagaaactaacaacaacaaaaaaatagtgcccaatcctaggtggctgaagagtaatatctaagagaatatgaagaaaacccattatttattccctaggccagataaggagccctggctttctctggcatagctgcagtgtatataattatacctctttcagtgccaattactgtgtgtatatccataaaaagaatggtacaatggtgacagagatgaagagcagatctcttaaataaacatgtaaaaaaaagcaaagtaaagaaaaataataaaaacaggtctattgctgttaatgccactgttccagaaaaaagtaaaacagagatcattaatatccataagagccagaataatgtctatatttttcatccaacatttttcaaaccatggagcccttttagaatctgctgatgactgtggactctcatatatacacactcataaaattttgcccacaattttaggggtttattccatagtcgtattgaaagcccatagatttcaggataggaataacaatgttgattactcatttggggccagacactttctatgccatataaagataatggcttatttagtcctcacaacgacactatgagatagttattattttagtacctattttacagatgagaaaactaaaggaaagaaaagttatgtaaataaattgagaaaactcagccagtaagcggcaaaactggactttaaatccaggccgtatgattccagagcatactccaacaaggactgtaaactgcatcctgcagaaacaaataaacaaacaaaaacctagaataaagaagcagatgatagagttttagaactggcggaacacatagaaattatcttttccaaattctatgttttaaagttgaggaaattgtattccacataattaaatgattaacagaagcccatagagcaagttagtgttagagccagggttcaagtgggaacattcatccaaagctcatgacaaagctacaccgatattattatcattattctacaggtgaggaaacagaggcacactgttaataagtagcagaactacctttcgaacccagataggcaggttcaaagctaaaactaccatattactgtaattcaggaaagccattccctttataattcgtttagtaggcgctcggaatgatcaaatctttaaattagaaaattcgaatgtcttcaatttacaaactttggaaattctggagattctactttacaatcattttaatgttctctaatcaaaaactaatgttttcagtgtgctacaattcatgaattttatattcatatcagaatataaaattatacacatgcatatatgaactttatatgttatatatgtatgaagcttatgtatgtatataacaatatgtatatgaacacaacctgaatacatatgtatatatagataaccattcaaacattttaaattggctatagaggaaagcaatttgccatttgacttaaagtcttttgtaatgactagaatttaaaataaagtttacaatttatgaagatgaaataaaactatacttaaaatgctgtttttcgaaacagaaaattcccttaaaacctcaaaatctattgtttgttttatataataaaaatccaaattttttctacaatgtctaaatcttttgtaattctgttatattttcctctacaagttcaactcagtgatacctaagtgcaaacaataaggctagtatgagagctttttttttttgagacggagtctcgctctgtcgcccaggctggagtgcagtggcgcgatctcggctcactgcaagctccgcctcccgggttcagccattctcctgtctcagcctcccaagtagctgagactacaggtgcccgccaccacgcccggctagtttttttttttttttgtatttttagtagagacggggtttcaccgtgtttgccaggagggtctcgatctcctgaccttgtgatccgcccacctcggcctcccaaagtgccgggattacaggcgtgagccaccgcgcctggccaaaagttacttaatttgcatgccaacctacactcacatctattaaatgattagtcaatcaagatatagacaaaactcatctattggcaatgtacactgagggacgtgttctcggtgtagtcctgtcaccgatcttagtacagaaataaataccttttttaatccagtggcataataaacctgagaaaagagaagtctttcattaagaatcttggaagaagcagtcgttaaccacttgtcatcagtattagcaactcaagctgaataaaaattgattgtgtgactctggaccttctttgctctgccacttggataatctattagcattggcacctgattaactctcaaaactgtctcctcttttgattagctcccaggatttcttttgtattctcagtaataattttccaaacccttttctaaaagactgactctaatgttcttttactgactgcaaagtttcccgtcagtgctgaaaacatgtttggccttcattcctatttataatttttggcttgatctttcataaacactggcttaagacttccgtatttggtgaacagggagtgaatgattactccgaaactttatttctgttttaagtgctttcagtatttggcacaaggtggaaatgagcaggctcagtactgaccattgctattacaataactcactgcatttccttaaaacttattttccacttaaattgttttctacattgatttctgtctgtgctaatacttggccatgtatgagaacaacctgcttgttttaatgtttaaattttgaatggtatggtaaggagaaagaccaagatttaaaagataatatattctgaaagggcaatttttggaaagcttttaatacttcatttaaaacccattcttcagcttattttaaatttaatgatggaatacaaccctctcttttttaaatgaagaggttatatacattccatcattattgaattttattctatgggccacatttactatttacctgctatattagtcagctttattataggctaatgctctgtaaaaaacaaatccaaatctcaatgacttataagaacaaacatttatttcttattcacatgtcaggttcaattttgtattgagtacaggtcagctctatgcatctctccttttaggaacagaggctacctgaggcgtgtacttcccctgacaaagggaggaaggaccaagaaaagtgaaaacactttatgattcttaagcccctagctcagaattgacacactctcatatctgactgtgttccactggtcaaggcaagtcacatgaccaaggccacatcagtgagtgggatgtgtaatccacccatggtgaaccatggcaagtggaaaggaggaagaaaaagaaaccgatgagcaaataatgtaaactaccaacttgttcaagaagttctaatgcaattaaatatatagtcaggaataataatactgatctctattggcacttactttgtactaagtctttgcttaagactactttcgatgctttacaggatacctcatcaaagtgaagctaagagtttttttaccacgattatttcctcttttcagactggaaatcttgggtttggtgtggcttatgagtcttttctttctttgttttgtttgtttgtttgtttgtttttgagatggagtcttgaactcctgtcggggctggagtgcagtggcatgatcttggctcactgcaacctcagcctcccaggttcaagtgattctcctgcgtcagcctcccaagtagctgggatttcaggtgtccgccaccacgcccggctaatctttttatttttagtagagacggggcttcactgcgttgatcaggctggtctcgaactcctgacctcatgctgcgtccacctgggcctcccaaagtgctgggattacagacatgagagactgcacccggcctatgagtcttttctaacactgcataactagtgcatgatcaagccaagaaatgtgggcccaaattccactacagagagcagacaataacgatgctcctatgggccattctggattacatatcccatgcaacaattgaggagccctacagggcatgcttagcaattgttccattgtttttttttttttttgtcctttttaatacatagacttctgtccctcgtttattgagggttgcccctgggagaactaaatctctatcacttctggactgccctgcaaatgggcttaccaagccctcctaaactgaagaaagccttaacacaaagaaacagagagatgtggatgcttgtggtgaggaatcttcagcatccacagaatccgttcactatagttataggtgaactcagggatggctcggtgaaataagggatgaggcattatcctcatctactatgccattttattaacctttactccatagtgtaagttgagtaaatacatcttgtgatttaaatatccccttataatccaggccctgtgtttgaccatttgtctgtttctaaagcatctcattaacagtatgtttggaaatggctgttgtgtgtcgtgcacatttggctgtttgctttccttttggtttgcaaagaagtattttgcaacccataaaaatagataaatatacaccacagaacaatgtatttttttaaattttcaggggagaatttgaatcttttaaaagtaatattgagtaggcagctgtatggaaacaggcatctagttagcagttctgctacaatatccaagtagttaatttcacctctaaattacactggagaccttgaccttattttgatttattctgtcataattagtctatggttattactttaacaaaaataagtcatctttctcatgaacactaccaaagcacatttcaagtctgcatactaattaatagtaacttatttttactcctaacaagtctacacccacatactcatgtttaaacaagatgagatatttgaaatcactttataaattataatgcaccacagaaatatccattatttccattattactaaaaacttacttcattcttttgagcatgaggaggtataatttatgtgaatatcatttcatattttgtttttatctttcaaatcgagaagacttgaattttttgcatatttacaaatactataaaaatcctactaattattaacatggctgccacgtagcaatcgtgtctattttatgaaataatgtcatttatacagaagacccacgggaagttgtaatatatttggaagtaaagatttataggttttgtctatttttttctctttctcagcattaatatgtcatacatgtgtcacatttagtcttcacaattcagtatctttattactattaccatgaaacaaatagaggcaatgagacacagagaggttaagtaacttactcaaggccacagagataatgagatgtgaaactggagttggaactcaggttatttgactctgaaatgagtgtatgatgtaaccccggcctgcattgtatctaacacatgcaattttaagaggataagaattaactgtttgcacaatctaccagatggcactgtttttccaactgagaccacttaacaccttttcatatactcttggagttctgatcattcttccactctaatacatttcttcaatctcattgtcattatgtcctacttcatgcaacttcgattaattcttcacaagtatatttctacaatacttgtgctatgtttccaatgtatagagcattgcaatttttatgaatatacaactatgcgattatgttaggttctcaccataactccaatttgctaatggagcataaattctgtgattaagtggcagggaatgggagagaacttttattcaatatgagctgacatggctttccaatctggtttctgagtccaacaactccctacaataaaaaagcaattgacctacctgagaaagaagtggcgtttgcagtggaggcaaaggaacagacaggtcatccatagcattttacattgtgtcagaagcatgacagtcatgaaagatgaagtaaagggcaattatatcatattacagagtgaaattcacctagagaaataaaggcagattgtttgcaagaaatattctttctcttaattttttattcattgtagtgatgaaaataagtagcaatatttcagttccaaggctaaattttggggagaagtcattgaaagttagttttatgtctaatgggtgctcaatggataatttaggaaatgaattggtgacagaaggtctataattaacagagtagtttgagcagtatgatgaagtgcagggggaaagcattggtctaggacttagtagatctgagatttaattacagtattgattagtcacttgatttattcaacaaacccttactaagtacctatttctgcttcagtataccatgtttggtgccaggagttgcaaagacataataattctcccatctaagtgtggtcacatttaggaggtaatgagtgggatttgggctgcattattggaagacaacaaactaattttctgtttgtgtgtgtgtatgtgtgtatgtgtgagtgtaagcaagatgagatatttgaaatcactttataaattataatgcacacacaattaaagtatctgtgtgtccatacacatacagttaaagtatttatgtgtgtaacacatatgcataattagaaaaaagcctacacatatgtatatatcagaaggattgattgataagttatgccagggagataagtgtgattgtgaaaaccctcacattcgacctagatcttaatagtgagtgtcctcattctagggagtgcatgaacaaaggactaaagcaagaaagcatatgatttatttatggagaaatttggcttgtgtgactaaggcagacctggtagatgtatataaggtttgggatatgggtgactgccaacaggcctaatcgataatatgtttagaggagtacactggagtcaaattgtgaaggcccttatatgccattctgaataatctagcctgtaacctcatcagagaagctctggatttttcaagttagttctcttaatatatgattgtaacagaactgtagtttctccatcagggaatttagctttatcattgattatccatgatccaactcccctaactccacatataattaataattagtacttaccaatactaccccgtaaacacatcttgaatgcacctactccttttccagccccactgccattcattaatgcaagtcatgcttacttctcacgtggattataggtataatcagctcatgtgtcttcttatttacagtttatccccaaatattctctacactgtgaaatttatttctaaaagccaagcctgacattgctatttccctacttaaaattctgctttgatttcgaactgccctctggctatattttcaggctcttcataaataggttgatgataatttcactttttctagggtcatctctgccatttttatcctcctccaccatctctaggtctgggaaaggaccatactctttctctcacatcctgacactttcacctgctcttttgattttctggagttctcttttctaccacttgtctctctgctcttaattaactttcaaaactcagctgagatgtcacttcatcaaggaagctctggatttttcaaggtagtttccttaatatatgattgtcacatgactgtagtttcttcatcaggcaacttatctgtatatttgtatcaacatacccttttgttgtgtctgcttctctcactaagctagaaggaaaaaagctagagacactgcctttctcacagttgtttttctaccacctagtaggtgtcagtacacatttgtcacttaatagccttaaatatgaaatgtaatttattagtttcctattgctgctataaaattaccacaaatttagtggcttaaaattatatacatttattctcagacagttctgcaggtcagaaatccaaactggaacttactggactcaaatcatgatgccagaagggctgtgtacttttggatgctccaggggagaatctgtctccttgccttttccattttctagagaattcccacgttatttggctcacggccttcttcgtacatcttcaaaaccagccacctcggaccaagtccttctcatagtgctttctaattctccccttatgccaacatttccccccttttaaggacccctgtgattaaatcctgcccactcagataatctgggataatctccctatcaaaagttagctaattagaaagtctaattctatctgcaataattccactttgccatgtaacataatttattcacagatgtcagggattagcacgtggccatttttgaggaggcattattctgcctaccagagtttaatagaattaatatctgcagaggagaaaaatgagaagaggactaaaaagtaaatctggtcttcgttaacttaaaacacctttattgagcactactatgtaacacattctatgctaagtgctgggattacagctctgatccagacagtcactctcttggaaatgagaaaggatgtaggtgatgttattaagaacaacttttgtaggatgatgagcagtgaagactgcattacattgactgtaaagcgaatgggaaataaagaaatatctttgacatgaacagcttttctgttcttcgtgcagaagtttaattattttagacctcctcattgtaagctgaccactaacgtcacctcaggcggtagaaaaatcccataatcaaagactattactcagatttaatagaaagcatttttcataccattttccattgcagcctcctccactctgcactgccattttgtaatattaatggcacagtaaatccactttctaaatatgtcctaaatttgtttccttcctttataatgctccaaaatatcacataaccttatctaatgtttatcattaatcttccatatttttcatttttttctcatgtttgatggaagcagagaatagactgaacttaattgctctcccatattacttcatagttctttattttcttttctttcttttttttttttttttttttttttttttttttttgagacggagtctcctctgtcccccaggccggagcgcagtggcacgatcttggctcactgcaagttgcgcctcccaggttcacgccccagtagctgggactacaggcgcccgccaccacgcccggctaattttttgtatttttagtagagacggggtttcaccgtgttagccaggatggtcttgatctcctgacctcatgatccgcccacctcggcctcccaaagtgctgggattacaggcgtgagccactgcgcccggcttcatagttctttctttaagtgaaattaactcatcccattgcatttcttcactacgtgagtttctaaactggtatcaactttaatattcccttccccttttaaagatacattttctgtgtcacattagggatgaagatcttcaattaacatattaactagcccccaaggaaatatcatttaaaaaatgtttttctaggccgaatgtggtggctcatgcctgtagtcctagcactttgggaggctgagacagaaggattgatggagtccaggagtttgagaccagcctgggcaacatggggagaccccatctttacaaaagaaaaaaaattaaaaattagacagatgtggtgatgtgtgcctagagtcctagctactgaggaggcagaggtgagagaattgcttgagcccaggggtctgaagttacagtgagctgtgatggttccaatgcactccagcctggggaacagagcgagaccttgtgtcaaaaaaattttattttcttgtacagattatggttaattgctttgtgtaatgggaataattgttagtgtttatagaactgtttttctgtttttttttttcccccagtttttaaatgctttcacttacattgtttatctgatggcagagaagaggtcttaaggaggctctccagcatctcgctcctaactctcattgcaatttcattccatgccactccctttctcacattttagagtgcaacaaaacagaattgcataatgaatgagcgtgtactttcagtttcttatcactctgtccttgtccttactgtctgctcagtgagattcatctttatcctcctcctacctttattccttctttactttctctcatccttctgaactcaacctacccattaccttctccaaaatatcttttctaacacccatgtggctacatattcctttctccatgctcctataatacgctttaaatttatatatatttttgtttatgcaaaatgtttcatatttatctatgatgtgtctattatctactaggctaagagctctcccagactgaatcttgtttatattttcagtaactagtgcaatgtccaggtcatagtaagcattctgtaaatatttattttataaattattacacgagtaaatgatctcattatatcctgtcaatagctccatgagttaaagagcaattaatattctcatttcacagttaaagacgctaaggcttggcaattttaaggccacaattctaataagtcctgcaaagccactggaagccagttccacagatttaatgttccctcagtttgcccagtatcattcttctgcagtaacttgctcttgtgaatcaagaatattgcaatttaatatatcccacatttatattcctgagggactaaggaatataaaagttaataacagggtaaaagttcattgtactaatcttaaaaaatatgaaaggccacatatactgaataaaaataactttattagaaggggttaaagattactgagaggaaatacaatttttatgtcatgttagaaagctaattttatatgggatttccccgtagagagaataaaataaaacgttggtcagtttttgcaatttatgaagtagtggttcttcacttcttgacatctccagggaacagttttcaagtaaattttcctaagagagattttcttctttgcctctcttattaatatgcacatgcatgtttttattagtaaaataaaatcagttataaacaaaccctaaaggaaatgaaatagaatatgtgctgcttgaaatgactaaacaggagcatataatcattttgtaataaaacagctatcactttattcttttctcatttgctttgttgctgattgcacattaatatgttttactatagactatgtgactacagaaatagacatcatgttaacgtatcaaaatagtttctagaacaatttatatatgtgtgatgtgtatgtatggtggctttaggttaactaagggtatacagcttaaaatagtcaacttttaagcaatatgacaaatagcaataaaaatatatcaattcaagtaaatacgtataaaattttagcatactaaaataaaaattaaaaggcatatgaccacttgggaaaatatgtccattcactgactaaaagtgagtagcttaattttgatcgttaacttggattttatggttataggagttttctgcaaggaggtcagtgaactctatgaaactatatgcaaatatgtatgtgtagacatttttctatagagaaggttcattattttcatcagataatcaaatggagcccatgacttgaaatgtttaagaattaccaatatataattatctcattccaattaattttaaaatattaaatgctcaatagataaatgagccaggatgtaaacaagtattttgacaaaaataggaacatacagaataaataaatgcatgaaacatcttctacttcattagtaatcaaattaattatgattaaagcaaacatcaaggatctccttacatctaaacaaagcagcaataccgtaaaagactaaagcaacgaaactcctatgaatgacatacctgcggctgagatgataattcccaacctcattctttctgctaccagtagaagtgggtgtgatcacttggaaagtattataaagatatttagcaaaagtcataaaggttttcataatgttgaactgataattttttcgaagacaattataaaaacaaaaaagaagtgagtgcatgagcatgtttattgtgatttagtctctaatagcaaacaaaaggaaagagcagcttatatgagatttatgataaaataagtgaaaaagaaagaatattattttggttataagaaatatgtatttatggggaatttaaaagtgtggacacaaaaattttgattgatttttggatgttaaaatgtttccataatgatatataagacgaaaattgaaataccaaatatcaattagtaaatgtaaaagcattattatttgaagtattaacaaccatatcatccagcaccattaaagaaggctcattattcagttctagatcagttcatacagacaaataagttatgcattgccaaattccaggacgctattcacataggttacaacatacatggaacctccttgagttgttcaaaatagaagctctgatttcatggttgttttgcatttgcgttaatatgttcaccttttgtgactctgattatcttatggtattctgtattgttaattatgcaattataatgtaaatgatagatatctggtcaatgtgaaaagccatggactttgattcagaaaatctgtatcaagttcatttctgtcacttaatagctttattccttctcagcttgtgtttatgtataaagtagtaaattacatacagattgagaagacataattaaaacaaacttatgaatagtaaggcactaagaattgttatgtattttataataataatacaattaattgtattaataattattatgttgaagaaaatatatgctactataccaaaataagacaataattcattgaagacatttttcttgtattaaagacgtagaggtgagagaggacaactagcaaagatgtttatatgttgaagctcacatttagtgttatttacacagtaaataagtaacactttgcacataatgtcaaggttttcgtgctgccttcgatgcttacctaaaaattactccttgtccatataattgaaaagaataaaaattttattctactacgtatttttcacttaaaagcctctagattaaatcacttcaaaagacctcatattgagcttttggcagagggttttgggtatgtttcaaagacatctgaatgtatgctttcaactgactcatttactctctgctttctgacagaaagtacgcatgcacatgtaggaaatataagtggaattgcaaataaggtcatttacttttaggaatatatgtatatactactgataaatgatgcgttgaccaatcttcctccataaagtctatgaagatggtttaattttgaccatttgaaatgttccatttctttttaaaattattttggaagggctagtattaattttatgaaagtaaagatttgaaggaggctagaataggtttgaaaactattactatctgtttttatttattcacccttgtcaacaaaggaaatacttccatattgtagctaagatttatcatataccatatgaataatgttgatattgaacatacatatagaagcttgtgtgaataacataattaaataagaaaaatgtattttgtaatgctaaataaaatttctcacctaagatgacagtttgaaatttatttattcactgttatttctcatattgactaaaggaatctacttatagattagtattgtgatttaaagataaacagatatttttggtgcatgcatatatttgttatgcgaaagtgattccttatgtttttaagagaagcaacggagatttactactgaaaaatatatgagagcaaatatgattactttgtaaagggcattttaataacggttcttttaatccaagtagataaaatataaaatttatcaattttaaatatctctcagatgcattcatttactgaacattaactaatatgattatatttacaataattaaaaaaatagtcttttgcttggagaaaaacattttaatatatcaagattgatgatttttctgtccatttgacttaatactaatttccagtttaggggcaaaaagatcatttgtagaagcatgaattcagtgaagctgttttttaataatttttctccctaatcccttagtataaatctttggggacttttttctttgagtatttatatgtaaggcatgaagagtatcatttgcatttttatttgaaatgttctgacttttagatgaaaagaggtcctagaaattttagagttgtagaatctccccttccttaaagcatgcacgtatttgtcagatgtattttctgagctcttaatttgttcagacagtgtgctaagttctgggaagcaaagataactaaaccatgctcctgctcatcaggaaacctcttccatagtgagatcaggcccatgttagagtatgtagatgctgcaaaggaaggaataatcatttctccatggttgggtggatggcatggggaaaggctccgaaatagtttttcggagtaaatgacagctgagagtttcttttaattatactggagtatctattcataactggcgaataaatactgttattcagaggagactatttttttataatcatacagtatttgaacgactatgggtttggtcatattaattgtttttcagatattacaaatctgaggcgggatcttgctctgtcgcccacgctggagtgcagtgccatgatctcggctcactgcaacctccacctcctggattcaaatgattctcctgcctcagcctcccaagtagctgggattacaggtgcatgccaccatgcctggctaatttttgtattttcagtagagatggggtttcgccatgttggcctggctggtctcaaactactggcctcaagtgatccgtcctcactggcctcccaaactgttgggatcacaggcgtgagccaccgcgcctggccatttttcagaagtaattttaatttggatgccccaaaccagcatcactcatgtttaattccatttatcaatgaatgtaatactaaatgtaaaaaaacactaacacatcataatggaaagttactttggttgtaaaatatgaattatatttaaagttgcttcctaacttttatttttttattttgcattttagatgaaagagaagatgttcaaaagaaaacattcacaaaatgggtaaatgcacaattttctaaggtaagaatggtttgttactttacttttaagatctaagttgtgaaattttcaaaatggactatgtacctgtgtatcttaaaaatccgttttatttctctcatagtgtcattttattttagctgtgcaaatctggaaatattatgttcactcttatttaaggagtaagcagcagaagatatggcaaagatacactatttaattatataaaatgtatatctttgattcttcttgacaatgtgagtttctttaatgacatgagtcctcagagtttatagctgcaatcttccatcaagtagctagaatatgtcacccagcagaagaagatatgagggaattttgttgtgaaaattatcatttttttgtccctcttggtctttaccaagttcaagaaaagcaatataattgctttgggtgtattcagccactatagtttagagcatatttcaaatgattaaagacaataagttcatcttgtttttgtgcaggcttcaatccatactcttaatatttacttaatttgcaaatacaactcaatttttaatcaatagcgtgactctagatgattataggtggacacagagcaagatattcttaccttgaaaactagtattaggaatgcaatatatggaggtttattgggatgtcaaagtttaaaagacttgcattttaattattattctcgatttgggtaaatcaatcaaatgtttggtgagtcggttttcttatgtttccatcatgaatgtttgtatatgtatatattgattgcttaattgagacatcaaatctagataatggaaaaataaagctaataaaatatggcccttaaacccaaggctttaagagtggcatagttttgatagtggatattttgtttcttattgtaatgatttaaagagtcactaaaagtgaaaatttctactaaaatgcctgaaactcttaatagctatgaattactccctctatgggtctgattttgtaaaattcatgataatggagccaaaacaatccactaggagatccaatctcaaaagttctcccttttctatgacaaacatttttagaatatcgtctattctttgtggtatttggtagtagaatgttgccatgtactctttaatttaacttactgaattttaactaataaaagttcattttatttacttgctgaataattaacaaatttctattacagacgtaaacagaaacatgtattttaaaaacgttttttaaatcctcaactttttttagctaagtgaaataaaatataacaacacaaatatagaagaataaataaaaagtaaacctaggatatttaggaaagttattcataattctccgaatatttataagatggttatatatagtttaattgctgtatatactggcatcattgacatttttaagttttggaattctgaagcagacaagagacatattttcaaacaaacatacagacaaatcagaattgtgaagaaattttctgaaatagtaaatgtaacaatactctgaatctttgaattgaactagagtaatttttaaaaggtgtgtaaacatgacaagtactgtgtatcctcattcccgcaagttgaaatagatcttcgctctgtgcattaaccttttccattatcatttatcacaactcacctgttaatatagaaatcaaagcttgatatccaatccatcctctatttatatattgttagcactgcctcagagcaattcggtatatttttttctgtccttatgaatgcccatatcttaaaactgtaaaatattcacatatatgagcacatttattgttttcttccaaaatatttgcatcctctaactcaactcacacttttcatttatattacaaatgttctccctaagtctgttataactgatcaggagagtcaccattctttcaagtacagaaattctattatcaagcatatcctaggtgtcaggaatagaaataaaagtttacaaagacagaggagaaaacttatttaaaggtaaaatgtatatatacctgtgcactaacttctaattttgagaacttgcaaagaatctttttcctcttttcttattcttttctgtcaaaacttagctaagtgactgcattcttttagacacttttgaagaagatgggaatttagaggaagctagttgattcagtttaagccacttggtgaaaccaaaagataaacataattgtgatatatatatcatttggcaatttattgcatcgctgcatgcctttcagcagaattctagccctgtaggatacacagattagttgaagtggaatctcctgaactcatggaacctacacagttatttgggagtttttggttaattgataaatggagttagaactgagtgggctcagtgtgggtggtctgagaaggcagtaatctgagctagagggaatctggtaacctttatgaagaaagctctaaaatgtgagcccatcaaaggcaggaatgtatatcttctatataatctcattgtttattactagtacactatataaatataataaatatactaggtcagtagtacaaatcattaaatctatgctaactgtagaaacagaagaaaaactgggtggaaaaattgtgttgaagaagactttaaaaagagaaaaaagagaatgaaaaattctgtctgtgtggtaaattagacacaggcacacacacattcatacaactataaaaatgcctcactaataaatctaactcatattcatttttatagtcgtattaatgtctatctgtgtctactttaccacacagacagatgataatttttcattgccttttatacacacatttatataatatttgtaaattatagagagacaacaaaatatttccttgttattttgtaaagctacggaagggatatttaaaggaaataaatgtgattaaatgtatccttgttgttgtggcgtcatttgaagccaaatgtgtctttgcagtaaatctaactgattttccactttcctggtaccattttaaaaataagccctatctctttttaaaataagtcttctattaactttgattccaaaaaattctactagaatgtgatttatcacatctattatatagagataactgaacaatatttatctccacataaacacaaaaccatttctagataagattaattcagagtaaatattctttccatgtaatttattgatatgttataatcctttaaaaagcctcgtgtatactctatgacaaatatgattcgcattataaaaatcttgctcatccatgccggcttaataaagggaagtacagttttgaaaacatgaccaaaaataattttgtcataaaatgtgcttgatgtttgtgtttgagaaaaaattttatgggaaaaaatatttactgccagctcaattgagagagataaactatctcccaatgagtgatatgatggttttgatcctatactgaatttagtaatcatctttatttccatactcactcttctgtctgatttttttccaacatagtatgcatgtttgacttaaatgaagtagaaatgcataattagttttgtctaatgtcttcacaaaagcccatgatatgatagtgttcctggaccaaactgaggattgggctgcttattcttgtggcccaataacgagatgcagatgaacgggaaaaggagagagtttttatttctgtaagtggttacagggagaagacctggaaattatccccagaccaactcaaaactataaagttttccagagcttatataccttctacgctgtatgtctacatgtaagtgtgtatccatctaaagacataaatgattaacttcttctgatctgtaactaagatctgattcctgaagacattcctctggagcctcagtaaatttactttatctaaatgggtccaggtgctgggatgattacccttatcttatctccggctaaatcatggagtttgggggagttccttcagatgcccagtaaacttgtttgtggagtcctggggagtttcttcagacccccaataaagcttttttaattctaaaagggtcctgttaagaattccttcattatcttgtcatgcttcaaggcccaggaaaggcctgggcaaaactcttggtgggcttttgttaccgtccagcctttgtttaagggcgctggctctatcagcttttaatatgtaactttaccactcagtcagtgctgaaacagttgttgtggaggcctgcattagtgagacctggcctgccacaatagttcatttacctcttcattgccgcaacatatatgtccacattaaaaatccaggactcaccctctttgggcaatatcatgtgataaaataaattgatatgacatacttcttgcaagatttctttttaatttaccttttagccagcatgataagcatgatgtagggtaaattaacactaaacttttgagtcagtaaggtagcctttctttttttaacttttattttaagttcaggggtacatgtgcaggtttgttatataggtaaacttgtgtcacgggggttggttgtacagattatttcatcacccagatattaggcctagtacccattaattatttttcctgatcctctccctcctcccaccctccaccttccgataagctccagtgtgtgttgttcccctctatgtgtccgtgtgttctcatcatttagctcccacctataagtgagaacatgcagtacttggttttctgttcctgcatcattttgctaaggataatggcctccaactccatccatgtccctgcaaaggacatgatctcattctttcttatggctacatagtattccatggtgtatatgtaccacattttcttggtccagtctatcattgacgggcatttgagttgattccacgtctttgctattgtaaatagtgctgcaatgaacatatgtatgcgtgtcttataatagaatgatttatatttctctgggtacatgcccagtaatgggattgctaggttgaatggtagttctgtttttagctctttgaggaatcactacactgacttccacaatggtttaactcatttactctcccaccaacagtgtataagtgttccattttctccgcagccccaccagcacgttattttttgataaagcaggcttcttcacactactctctaccttaggagaaaacgttatatccatactttaatttatttgaaaagaaaggtgaatataaaattgaaattctctgagtcttatttttcttatatgttcttgcctacttgtaacaaaacatataataaaagggcattataaatagtaaatcatataaacacaaaatattcccatttttgtcattatgtaatgtattttctgaattgaattgaaaaatgcatatatttatgaatttttttctactgaatctctccttcttatttacttctattcttttccatgatgttacctggtcttcttgagaacatgatattttaattgtaatcattgtgttcctaactccataatttcatgatgctattgaaatgcacatgaattttgattctataacctagtttgtaataagccatatttccttgtttctctacattggttgaatctgttcctgcagcaactagtaaccccaacaatctgactggtgagaaattcaatctccgtaacattttgcattcttctacttcttcccacttccattccaaagggccaggtagagtccagaatactgtaagtgtcctggttttcagtgcattttggtcatagctgatatgcttaatagccaagtaaacatgactacataaaggacagcttgtccacaatgccctgccttgcttgaacacggaaggttttgctgatgatgctctgtgcttggtatctggcctctacagccatttaagtaggttgtctcagcacaacatttggaaactctgtaaagggagtaggatgttggccttcacaacttcatccctttccctgtgtttgaggaagctcattaaacctctctttaatctgactgattgcaaatttccactgtccccgaatcttaactcccatatcccaatagcctgttcagttgggacaatatatcaatccttaacatgaatctagattttcagaactaaagtttttgaagggtgattttcctctggatacttgttcatttctttattgattatggttttggctaccttcttggcatcaaacagggaaaacagagcatttattcatgtgttactatcctattacactctgtatgccaattcatgtcctcaacacgtacacacaaacacacacacgcgcgtgcgcgcacacacacacacacatacatatacacacacccagtaaacatattctatatttaaaatgagcttagaagtttttaaaaaaggatgatactgggacaaagtggcaaaacattatttcagtgaaggaggtaacaatatatatgtacctttccattgtgtaagtgaattctaaatctgtatatagctaacacatttatatataactattgtgcaatgtgcctgctttaacagaagtaatcgagcagagctattgtgccatggaaggttttacatagatctaaaatggctcctgtgcccctggcttcctgtttgtttttatctgataataggaagaattaaatcattagagcagatgacgtacagtgaactatgtctctggatgctgatgagcagcctgcacaagactttggtaacaattgaattatttagtgcaattattttggagagatgaatattgatacaggaaacttacggaaatcctcgtttcagaaatagtgaggattgggaactttttgtttatgtataccatgatgttaataatcctactgaaaattatatgtatatggttagttgctccaataatcatatgatacaagtattcaagatgagtaaaatgtgaatttatgtggcttgctcacagtaaataggagagatgaagctaggacccaagaaaatggactctaaaactcatgatatttccatacctattattgttgggacaaaaattccacctacccaataatgcatttttgggacaaatcatcaaattgataagtcctatgagaagcaggcaggggggttggagacagtgaagactcaataacaggtggtattaaatgctcgcttactcacagaggatttaatctacctttgaatgtttagtaaccccaaaatgcaaccattgtttaggaagttttttagttgattctttctgaatgatttctaatacaaatgcccctcaacttgtgtggttaggtccctataaacccatcataagttgaaaatatcacaagtcaaaaatgcctttaatatacctaaccttcgaaacaacatagcttagcctaccctactttaaatgtgctggcttaacactatcctagagctgggcaaaatcatttcacacaaacctattttataataaagctagctcatgtaattgattgaatactgtactgaaagtgaaaaacagaatgcatgtatgggtactcaaaatacggtttctactaaatgagtatcaccttacactattataaggtcaaaatatcttaagtcgagaactgtttgtactttaaatgttaatattttttacatactgcgttttggtgagtgaagtaaacttagtttgcagtagagttatctaaagtgatattgtcattttcaaacattgctttttatttctactactcataaacaaattattgtgtttacatgattatttgaatattaacttaaaacagttttatacgaaattcaaaataccactttactggcatgtgaactccctaacatctacacttggtgttaagatgacttgtcgaatgatgtgtttgtgtttggaatcaagatgattatactaaatggtttaatctactgagaaccattcccttgaatgttttcctgaaacaatctttgcaaagtacctaagtaacaaaggatattactcagttagtgagacaaaaatggattgtgataggtctcactgttttcaaagaaagacaaatcacttattgttaatagtaaagaagtttcttagaaatatgttgctgtttatcaacccagtgttactgagatcttgacaattccttttagaaggtaaatgttttggtctctaggttatcatgtcctgatacaagaaaattggaattattgattacacctatattctctggagtggtctcagtgccaagcatatttagcttgcatatgtaaatatttaccaattagcatgatagttgctagcaaaaaaaccaattctttatggctgatgggcctatccattatttatctgattttattttgctttctagcaaaacaacatacatggacattagtgaagcatttttatttagaaaagaacaattgacactctggtaccatcctatcagagatatatgtttactaaaataacctttcaacatttaacaaatacttattgaatgccagctatgtgctaatcatactgtcatacagtgatgaaggcataacccaacatggttttccctctccaagagattatcatctgagaaaggaaacaattgcatcaacaaataattaaaataaaacataatctttaatgcaatagaaatgctgtgggaacatagaagacagaatgactaattgcttggagaggataatagctttttaaaatatggtgacatttagtctggtgttgtctacgcagagacaatttcaagaaagatgaaggcagaaggaattgcatgtagaaatgtgtaataatcaaagaagtatgacttgtcaggtgagtagtagcaagggagatctttaggagtgaagaagagaggttgtgagagggcatataatgccattcttgaagaattatattgttgtggggctggttgagccaacaataagataatggcttagtcatgttaatttgcaacttctgattgaagactgtgaagctctaaaacaacaggcaatgatagaagaattagactgccccaccaccactaatgcttcatgcaaaatttggtctgaagtctaccctttacatttggcaatagacatagagacctaaaatggaaaagcaagcaggctaccatttttgtagagttgtttgataccatgcacactccaaaacgatgcagcaaaacgcattggaattacctagaaaatgtgttaaaacatggattgctgaggcccatagtcagagtttctaattccataggtctagggtgggacccaggaatccggatttctaacaggtcctcaggtgatgctgatgctgacggccaaagaaccacactttgagaaccacagtgttagaatttcagtaatttaatcaggtctgtagtagagaatgttggaggaaaccccactgaggaatttattgaaccctcaaaggggaatgacctttttccagttgagaatcaatgcaagtacttgatttaaattgggatttattttgtggggactatactcaaaaactgaatgagttaaaagactcaaaatcaatcaatctgatactgattgagcattcttcgtccaaaacgtttgaaaatagaaatgtttcaaattttggattttcgtttggaatatttgcattatacttactggctgagcatctcaagtccaaaaatctgaaatccagaatgctccaatgagcatttcctttgtgtgtcatgtcagccctcaaaaggtttctgatttgggagcattttggatttgggatttttggatttgagaggctcaacctatacctattttttaaaaaatgtgtatatatatatatatggatatacatacacacatatatatgtacatatatacatatttatacacatatatgtacatatatacatatttacacacatatatgtacatatacacacatatttgtacatatatacacacatatgtacatatatacacacatatgtacatatacacacacatatgcatatatacatacacaaatatatgcatatatacatatacacacatgtatatatacacgtatatatacatatatacacacatgtgcacatatgtgcatatacatgtatatatacacatgtgcacatttgtgtatatatacacgtatatatacacatgtgtatatacacatgtacacacatatgtgtatatacacatacatacgtgtatatacacacatgtgtatacacacatatgtgtatatacacatacacacgtgtatatacacacatgtgtatacacacatatacacatatacacacatatacacatatgtgtgtatatacacatatacacacatatacacatatgtgtgtatatacacatatacacacatatacacatatgtgtgtatatacacatatacacacatatacacatatgtgtgtatatacacatatacacacatatacacatatgtgtgtatatacacatatacacacatatacacatatacgtatacacacatatgtgcatatacacatatacgtatacacatatacacgtatacacacatatgtgtatatacacatacacacatacacacatatgtgtatatacacatacacacatacacacatatgtgtatatacacatacacacatacacacatatgtgtatatacacatacacacatacacacatatgtgtatatacacatatacatatacacacatgtgtatacacatacacacatatgtgtatacacatacatacatatgtgtatacacatacatatacacacatgtgtatatacacatatacacacatatatacacgtgtatatacacatatacacatatacacacatgtgtatatacacgtgtatatacacatatacacatatacacacatgtgtatatacacatatacacacatacacatatgtgtatatatacacacatacacatatatgcacatgtgtatatatacacatatatgcacatatgtgtatatatacacatatatacatatatacgtatatatacacatatatatacatatatacgtatatatacacatatatatacatatatacgtatatatacacatatatatacatatatacgtatatatacacatatatgtatatgtgtgtatgcatatagacacatatacatatatacacacatgtgtatatatacgtgtgtatgtgtgtatatatacacacgtatatatacataagtgtatatacacatatgtatatatacgtatatatacgtgtgtatatatacatgtatatatacatatatgagtatgtgtatatatacacgtatatatacatatatgagtatgtgtatatatacacgtatacatatatgtgtatatatatacgtatacatttatgtgtatatatacgtatatatacgtatatatagttgttttaggttataagacttaaaaatacttatctgatgtatatatatatttttaacaatcctagttattttgtgtttcagggcagataggtgatgaataaagatattaatataattgtgttcaaaggttagaaaaaaacagttcgttgtggcattactattgactgtatccgcaaatttctttcactgcaatcctttcatgggctactatatatttttcttaagaataaaacatttccaattgacctacagagtctttcaatctctcttttgtgctttactttgcttcagcagaaggatttcattttagtgacactctgaaggtcttcctctgtgcttcacttaagggtgttgcatttttaaccttaccaagattcctatggattcctagaattatatttcaaattatgatcatggtagccagaacacaaagaattaagatctactctgacagtaatgtactgatataactttaactgtagaaacctttcttgtaatgcacatggagggcagacttgtatgtatcttggaacataaaaggcagagtatggtttttaaaagggctttgcttatttgtatcctaatttagctaatttcactatgccagttctatatgcagagataagtaatagtaaaaatggacaaaaagtgatcaataaacaagtgatcactttcggtcttgtccagaattgtggccaggtgatgagtgcaaactaagagaccttttcattagaaatgtgtgaagttactctttggtttagcattagctgtcttttaatgagaacaaatgagagttgcagatgaatttgctaaatgtttctttctttgatttagtttacctggcctgaagaaaaaaaaatgtcttcgatctacaaggtctacggagagtacttttcataggaactagtcctattaaaattacctgcagttattatgtcagtcagagaataaatattttgagtatcatatctgtacttgaagttcttatcctttacaaataatttatatttaaggaaacatgctttgacagaaatacacatgaagtctacattctctatctatttcatatcaggtgctctagtgttttgaatataacagttaagagatcaagtccctttaatcataaggccctgttagctagcgagctaaaccaaagagggaaacatttagcaaactatctgacgttctctatatttgtttgtcaacttgtttgttttttctctctgcaagtagaatatagaatttcagagagtgacaagtgctaagagaaaaaataaagcaggataagggtagaatagggatatttcaaagggtaggttgccattttatgtagtgggtcctggaaaagcctcacttaagaggcatacaaaaaacctgaaggaaggaaaggagggcatcttgcaggtgtcttggagaagagagttctaggcagagggaagaatatgtacactctgaggagggagtgcgtgtttgtgggataacaagggagtcaagatggctggtgcagagtgactgaggaagagcggtaggatctgcaagtggagtggtattagaaggacaaatcagatagggccttattgaccattgtaaaggtcttggcttgtacattgtgggagattaggagattttgagagttctgaacagtagccagaaataatgtaagttagaatgtaggatgtaaaggtagaagtagagagatgagttagaggataatgtagtaatgaaggctgggtgtgtgcgtgtggctaggattaggttgatgtccatggatctggggagaaatgatcgaattttggatacattttgaaagtagatgtaacaggatttgctggtggactaaaaatggagattgagagagtggagaaaaacagttttagcttgagcaaaaggaaggatgggatggttatttactgggataagaaagactattgcaagagagagtttggtggcaaagtataggtaaatttcccatggaaaatcattgaaaataattttagttttagtatgtttttatggaaggagtatttattttcaactcctaaaatttatcctcaagaacaagaataaatacatttatctctattaaaaaataaggaacaatgagagatgatacaagtgcctctagcattgtatgagtgtgtacaaccagtgaacgttaacttgtaaatccagtagcagtaacttgatctttgtctctcttctgatctgatagagtgcaaggtctatgtctacattcatttttttgcatgtagatgtccagttgtttcagcattatttgttgaaaaggctatctttgctccattctattgccattgctcgtttgtcaaagatcagtaaactgtattcatgtgggtctatttccacactattctgttctattgatgtatttgtctattattttgccaatacactgtcttgattactgtcatttcatagtaagtcttgtagtcagatagtgtcagttttccaactttgttcttctccttcaatattgtgtgggttattctgggtcttttgcctttcatataaactttagaaacggtttgtctatataaggcaaggtaacttgctgtgattttgattgggattgcgttaaatctgtagatcaacttgaggagaactgacttctttacaatattgagtctttctatccatgaacactgaatatttcaccattcatttagttcctctgataactttcatcagagttttgtagttttcttgtaaagatcttgtatattttttagatttattcctcagtattttatttttgaaaatgttagtggaaatggctttgtgttttacatttcaaattccacttgttcactgctggtgtgtaagaaacaattgaattttatatattaatcttgtgtcctgcaactttgctacaattgcttattatttccagggttatttttcgattctttcagattttctacatagatggtcatgtcatctatgaagaaatacagcttcatttctacattccaatagatatgtctattttctttgtcttattgcattagctaggacttccaatatgatgttgaaaaagagtggtaagagagacatttttgtcttgttcctgatcttcctgagaaagttttcattttctcaccactaaataggatgtcaattataggtgtttttgttcatttttttatattgtcatgaccttgttttataaaatacaattatttctctcctaactttctgtggacctcaattataattttcccataattctcttctgcttgcattgctcatgttttctgtcttcttcccatttgttcttatttgctttattttgaggaactgtttctcattattgaagtcattcctcaaattacaagtgatcttagcttttggtttatatttaagtgtgagatactaacatttgataaaattaaaatctatttcatgattaaagtacatttaatataaaacagaattgaataattttgttgacatattatatatatatatgcgtgtgtgtgtgtgtgtgtgtttgtgtgtgtgtaaagtccaaaagtttgtacattacttaaagaagaaacatctgatgcattctggataaagacaggaaaaccatatgagtactacagctacctccattaatacttaacattgtgttgaaaatattagccattgcaaccagacaagataaaccaattcgaggcaaaacaattgcaagcagtggtaatgggatcccaatttacagatagaattgtttacctcaagagatcacacaaaacaataatattaacaaacacaaatatgaacacaaacaaataccaataaaataatttagtaagttagcagactataaaatttacaggcaaaatcagtaaaattcattttataggtaatgagctagaagtttttatggatggtgcacacccatttgcaacaatagcaacaacagcaaaaacaagaaacacatttaacaagaaatttcagtacctatgtttaaaactctcctgaacaacccaaaaggaaatcaaggagaaagatgctccttgttcctgaaaagcatggcttaacattataaagtaaactattgtttttaagttaatgtgtaaattaaaggcattccaatataataagtagtatttttttctggagttggataaattgattataaactttttataaaaaaatacacaagtaaaaataaccagaaaaacactaaaaataaatatcgatgaagggatagggaaacataaaattataaattaaaacttagggaaaactatcatattaaatataaattttcaataaaaactaacaatttgttaaaatgtgttttgtaaaaatatatttctatcagctgggaaggtctggtagtaatgagtatacctagcatgcagatattcattggtaagtctcattccacactgaaagaagtcacagctcattagaagaatatatgatacttcatcctggccaaggaacatagtgggtgagcctgcagcctttgttagagccataaggcaaggaagtacttcccaaaatttgctaacatcttgagttgttcatttttcttctcctgttttctttatgcttgtagagttacacctttttaaaaggttttcttcctgtcattttattggaaaggcttcaaataatttttaaaacatatttatagatgttcatactcatatattttcctgatactgaaagagaaatttatgcatttagtaacaataaatgttggcctagattttctctgatggtctcttcaagaatctggagcgttctctatctccacaaaggatggaaatgtttcatttcaatatgccagttttcaagtaaatgtgatttagtttctctcttttaagaataaagtcatagcagaatgctttatattactgattgtagtatcataacttacttctgaaacatcgaatacaattttggaaggtcagcaatgtcctgttaatatttaagtatgcctcactatataatatgtgcatacattctggaagaagcatttaaaatgaagactgtttctaataatatattaaacgagctatgtaagtagagttttatgatagctgatattgtgattttattcagagactatttatataagacatttcagcatatctgctaaagaacaaacctatcatctaagtcagtaaaccaataatttgaattaaaaaaacggacaaaaagaaaatacgaagcaacttgaaagatcattaaatacactgcctgatagttaagattctaaacagttacattatatgaatagtttactgtatattatatattttctatttccactttgttataggtaagctaatcagatgtctcaagttataaaataatagcactaacttataaaagaagtgctacctttcttccactccccaaaatacacaagattttattcttcataaatgataacatttgttgtttgttttctgtggttgaaagggaagtacaggaatgaaataatgtattttgcaacaacttggatagaactggaggccattattctaagtaaagtaattcaggaatggaaaaccaaacaccgtatgttctcactcataagtgggagctcaactatgaggatgcaaaggcataagaatgatataatggactctagggactcagagcagggggaagggtaggagatgggtgagagataaaagcctacatattgggtacggtgtatacttctcaggtgatgggtgcaccaaaatctcggaaatcaccactaaagaacttacccaggtaaccaaaaaccacctgttcccccaaaagtattaaaataaaaaaatttaaaattttgaaaaattaggaaaaggaagtacattttcatgtgttgctctgttttagcacacctggtgcagaggtccctgaggaattttttctttttcttttttcttttttcttcttctttttttttttttttttttttttttcgagaaaaaaatatcacacatttgaggcaggagaatagggtctggaggaagggaacctaaggccatttcacgctgacttccctaggactaaactgaaggcaaaaccctaactttccacccctaagtaacataaggaccagaggctactccctttgcaaacctcccaccttttctgtgtagcagatgggaaattggctgttcccaaccaatcagactgattgcgggcccagtctttgcacagaagtgcaactttgtaacttcaccttagcctctgattggttgctttttgcaaccaatcagatgtttgcacaggagagtgtcctatgtaactctacttcagcctctgattggttgctttccacaaccaatcagaccaattgcaggccaccacttcatttacgtggggtgagcatgaagtggccaatgggaaacctgtagagggtatttggaccccagaagattttctttatctgggcacttgagccgctgctcagcccgctctcacactatggcatgtacttttcattttaaataaatcccttcattccttccttgctttgtttgtgcattttgtccaattctttgatcaagacaccaagaacctgggcaccctccactagtgacacactgataagatcttattatattgggctgataattcacctacacttttaccttctgaatagaaaaggcacttgattagagatgtatatatctaggtgctgggatcaactatgccatttgcaaagtaccttacttcttgagcaagaaggtaaccaaaaggggaatgaataggcaatataatttcttttaaaaatgaattagtaagctcttgtggttacaacaagaggactgttgttttggttctttcacaattttctatagtaaaatttgttagtattaaagtataatgttgatgcctatatttttaaaagatataaaagtagagattttaaaagagaattaaaaaggttttgagggaactgttttagattaagtaagataatgaagagaaacaatgcttaaaatattagaaaaaaagacttatgagaaaagtcagaagtactgaaactgtctagccaaagtagaaacgaaaccaaatgatacctttctcattcatattaattatttgaatgctttggttttgtttttctttattttatattctgttagacgctgtctttcttgtcttcaaccaattcttttctatgtaacattagacagtgtctaataataatacacaaaacaaaaaagttgtaaagaaaccacccacattttctcttcaaaagaaaaaattgtctgagaactctgaatgtctaaagtccttgaataataatgggaaatggaggatggttcatgagtgtttttcagtattagcaaaagactgacaaaagcatgagtttatcaacaggaagtacatatagtcagacttatagactgaaactgttcctaaagctgtgtgtccctgttttagaactatcaccacagtcactgaagccctgggcaattcacagacattgcaaaatcaccacagtccctgaaggccaaagaatgagacacaggagtcttttatcatttcataactcagtgtgcccattcttcctaataggcaggacccagcatctgtggtcctcaatacaaccatttagaaagtcacattgtagtcactccttttgcttgttctggcagggactgaagttggagcacaaaaaatcttgtaaaattcagttcctatatcagggtgtttccccctttttatcatgaagtcacatgtcccatcctgtgtcttaacagtaggtgattattagaagagtagctggcacacagtagatttataataaacaatggaataattagagtgcctagcgcacagtaaatttataataaaaaatatagaataattaatgatgaagaaatgaatggtagatgtagtagaatagaaagatatataggaatcctgagaagtttggcagcacatccaatagaaatgtattgcaaaaagtttatatagtatttacatttcttatagcctcatttaaaaactgagaagaaacaggtgaagtaattttaataatatttatttaactatatgtaaaacaaaaatattatttcttcaacaggtaatcactatatcaattagtattatttattgcattatttattgtaccacctctctaaattccgttgtgaattttacacttccagcaaatctcagcaacacgggatagccactattcaggtgctccaaagccacatgtggctagtggctaccacattacacagcatagctatagaggggtcttagaatattctgactaagtcaggaagggacttttgtcacctccaccaacatcccatgggtcagaacccagttatatggctaaacttaattgcaaaggaaactagaaaatgtaactatagaggaatctttaagaaactattggtcagacaacctaagtgtaatgtgacaggatattatctaaaatcttaatttgaaacaattacatatagttgatataaaatgcataaaatagagaaggatgtactatttttgaagccaggttcaaagtgtatataatgaacactattgaacaaagcaagatttaaaaaaaattgtgaattgaataaaatatgtatagtaaatgtacactctattatgtaaactaaagtatgtttagtataaaaacacccctatactaaaactcctttcaatactccaaagcagtaagaaaaaaaacacaaaatatacatttaccaatcttaatagtctagcttataaactgatatggaattcgttacatgatccctgtttgaacattatgtaagactagcccaggaaatgatatggaaaaaggaatgaaaggtaactttcaacgaagttacatgggagagtgatcaaaagaaaatgtgactttttttccttaactcaacacgtgtacgtgacgcttcaagtatgcaacaatggatctgtgctcaagtcaaatgcacagaccagaaacagaaattggtcagaagacatttcttgttttttcggttttttttttgttttttgtttttgtttttgtttttgtttttgagatggagtctcgctctgtcacccaggctggagtgcagtggcacactcttggctcactgcaacctccgactccctagttcaagcgattctcctgcctcagcctcctgagtagctgggactacaggcacgtgccaccacacccggctaatttttgtatttttagtagaggcggggtttcaccatgttagccaggatggctcaatctcctgacctcgtgatctgcccgcctcagcctcccaaagtgctgagattctgcgttggtcatcaatgtttaaacatgttaaacgtaacatgttacatttaagtaacaatacctacataatcatgtaagtacattcattgccaacttaaaagggagtcttcaaagcagaattgtcagaacttttagcttccctgggccacactgggagaattgtcttgggccacacattaaatacagtaacactaatgatagatgatgagctaaaaaaaataaatctaaaaaatatctcatgatgtttcaagaaagtttacaaatttgtgttgggctgcattcaaagctgtcctgggcctcatgcagcctgtaggctgcgggttggacaagcttgcttcaaagctaacattttttctccaaaattttccctactgctatcgcgatcaatttgtttcctctgaagtgactgattttaactgagatatttttgtttgtttgttttctggttctgcatgtataaatccttcgaatagtgtaaggacactgaatttccagcaacttctgtttcgaaggttcacacttcaaactataacatgttgtgtaattattggaaaagtgtcctaaagcttccattattagcctataaactatagttttggaagagactttgcccaccattttacattactagctgtgagtgcctaacatttagtaagtacccaagaaatatgaatgttagaataaagtcatacatataagaaattctttacattgttcaactactggagaatatgttatatgtagtgattatttttaaaagcattataaaaagcatttcaatttgttcaagcatctcaataagttagttaaaatacacagaaaatgaataaaacaattagaatatatatgtagcatttgtgtgtgtgtgtgtatataaacatatatatgcaaatgtgtgtgtgtgtgtatatatatatataaataggtagagaactttaaagtaattaaaatctgaatgtggttagctcaagtcaggtaaatttgagaaaatctttacaaaagccatttgctcatactactcactctcagattagttgttcatcaggtaaacaatttgctaaataaacatttaaataaaagaaacacattgcataggggaagaaaacataattttacctctaccttgattttttttttttttttttttttttttgacactgggtctcactttgtggcccaggctggagtgtggtaatgcaatcttgtctcactatagcttcaacctcccgggtttgagccatccttccacctcagcctccccggtagcttagctacaggcatgcaccaccatgccgggctaatttattattttttttactttttggagaaatgagggtcttgctatgttgccaaggctggtcttgaatgcttgagctcaagtgatccttcagtctcagcctcccaaagagctgggattacaggtgtgagccaccgcatctagcctctacctttatttcttaactgggactcctataacaaaagagatatcaacaagaaaaaaacaataaagtttactaacatacacacctcatgtatacatgaaagatatataaggaaaaatgaataaatttctctgacaaagaacaatacgttttttgagaagtaacaagacaagggaaaaggaccctgagtctctatgagtggccaatttcaggaaggcaaatatatgggaaactgatggtagataaaggctagttaagaaaatttattatgtagattcctctgatgcagtctccgggctgataaagatctaaagttgtcattggtgatcaaactttgtcctttctgatagagaggagaggatggacacctttgcaaatgtatgtactgttttcaggcaaatagtgggagggcagagaacttatatctgcttcttctgaattgcctttagctcaaaatagtcctgtgtcaaagtggcatattttcatgaacatagagaatggaataatagacattggagacttcaaaaggtgagaggggccgggtgcggtggctcacgcctataaccccagaactttgggaggctgaggcaggcagatcacgaggtcaggagttcgagaccagcctgaccaacatggttaaaccctgtctctactaaaaatacaaaaatcagtcgggcatggtggcgcgtgcctgtaatcccagctattcaggagaccgaggcaggagaattgattgaacccaggaggcggaggttgcagtgagccgagatcgcgccactgcactccagcctgggtgcacagggcgagactccatctcaaaaaaaaaaaaaatggcgggaggctctcatgtaccccagaaatttatacacctacagtgtacccacaaaaattaaaaatacaaaattttttaaaaggtgagattgtggcaggggagtgaggagtgagaaattacctattaggtacaatgtacactattggagtgatggtttcactagaagaccagacatcactactatccaacatatgcatgtaacaaaactacactgtacctcctaaatctataaaaataacaacagaaaaaggcaaatatacatatgctttcttatagattcattaatctgttttatttcagtgaatgaaaacttttgacaatggctaaccttgaaaatatgttattagaacatgtttttctttctccattgtgccctatgagcacaacttgagaaatccagcaataaaatgcaagctagtttttttttttttttgaaacagtcttgctctgtcgcccaaggtggagtgcaatggcactatctcggctcactgcaaccttcacctccagggttcaagcgattctcctgcctcggcctcccaggtagctgggactacaggtgtgtgccaccatgcctggctaattttttatttttggtagaggttttgccatgttggcccggctggtctcgaactcctgacctcaggtgacccgcccgcctctgcctcccaaagtgctgggattacaggcatgagccaccgcggccatcaagcctgctttcttgacatattttgtgacatattttgggatggcatatttcggtctcctacagttggcagggcaatctaaagtactttaatatccttcttcatgatactttcaaaaaatggaatttgatgcctcagaaaacaatactaaaactttcttaaaatattacaatgtgtactatattacttttttaagtaataggacttataaatatttatttttaaaatttgtaaatatttaccatccacctttgattgaacatttttttctcattattttatccaaaaatgtctattgagacctttaaaatttgtattttgtggcaccatctaagacgtgatttatgctccttgtcattatttaatcgtcaaaatgatactttgtctttgcttaaatcagtgtgggtacatcgaacaaggtttgagagctactctgtaggactgagtcattagcctgtaattttacagcggatcaagtactacgttttcattacttggaaagaaaatgaccttgcaattgactcttacatttaacgtttttatctcagctttaccaccattaaatataactgtttgcactgaccacataagaaaccagaaaaatcactgggtcacagtttaatctaattcaatttaaatccgagctagatagctataattggcagtttaccatatcaaaggccagagttaagttacactcaaaattgtgttgatttggaagtaatttgccttaaattttcaagcattgttctgggggtactaaaatgctctttcaagagtttactatatggtacgtaatattttccaagtgttagatgatttatgaagtctacattattatctaaaacaaccaatgttgtaactaccatacaagtctatgaatagaccttatttcacttggcctatctcagggtacaggatcccagccttcttccgtggcaatatgcaggctgttcctcagcaacgatttctagtattgtgtgaaataatcatacttacaatactaacttcttgcttcccaatgccaagaacactcatcttgtttctattgaataaggtgacaggcatgatagaagcagggcagagccaagtcctgacagtaacatttcaagtacagagaaattcatatgagaaaaatggacaatgagggcttgttgtccgtgactttttgttccatgaaaaatatgcctgttagcaaaatcacataactaggaattttagataaagtttctatgtacattatttaaaagagtgctttatacggcatttaagttaaaaagaaagaaaaaacattcacattaaacctaaaagtaactaaaaagtcatagaacagagatgtcatacagatggctagcctttattaagtgtcaagcattgttataatggatttgcatgagttctttaattgcatttatttatcttgttttggtttggtttttgagacaagatctcacttcgtcactcaggttggagtgcagtggagtcattgcggctcattgcagccttgacctccaagccatcctcctacctgaacccccaagtagctgggactacaggtgtcccccaccatgctcagctaatgttcctattttttgtagagatgggggtcccctatgttgcccaggctggtctcagactccatagctcaggtgatctacctgctttagcctctcaaagtgctggcgtgagccacggtgactgaccttatttatttatttttaatgaacaagtaacagttgagtaatttatggtgtacaatgtgatattttaatctatgaatatattacagaaacattcaatcaagctaattaacatatctatcacctcactaacttatgttttgtggtcagaatgttgtctactcttggtgggaatgtaaattagtatggtcattttggaaaataatatggagattcctcaaaaacctaaaaatggaattaccatatgatccaactttcctacttctggatatatatccaaaggtattttaattgatttgtcaaagatatatgtgcactctcagttaattcttaaagcaacgtactgagatagacattattagtatcctcattttacatatgacagaaccaaagcagagaatagttaaataacttgttcaaggctaaacggagaaagaatcaggattctttttaatattttcaagattcccaagttcaaatgattaaacaatctattttttttttttttttaaattgggggcttccaccttttttatatttgttgttagtgggatttaggacatatcatccccaaatatggcaccttggcatttcgggaaacagcggaagtgagaaagtctctgaccttctgccaccattttcctctgaagcagatcagaaaagaattatctggccttgctctgaagtaggccataagacccctcatgtgtcccatacctaaaggaaaggaatgtcacactgggacacagagaagactgaacaaacaggctttgctacattcccccccaccccaactttattaccattagattacacccttttgttctccaatcatacttctgccaggttgtccactcttcatcaaatttagcataaaaatacacaggtctcccctttttctttaggtattcatttctgaatgctcctgtgtcctggtatcatttgtaaaatttatattaaatacatttgtatgcttttctcttgttaacctttcttttgctataggggtctcagctatgaaccttgtgataggcgaggaaatcaattttttctcccctacattgttcacaatccaatttaagagaaaaagtgagcactcttgatgatccagtaccccccaaaacacacagacacatgcagaaataaaacaaaagttttataaaaggtggcatttttagtatatgtagccacactttaataattttatttcattcttttctatttgtttttttttttcctttttttgagatggagtctctgttgctcaggctggagtgcagtggcatgatatcagctcactgcaacctctgcctcctgggttcaagcaattctcctgccacagcctcccaagtagctgggactacaggcacacaccaccatgcctggctaattattgtattttagtagagacggggtttcaccgtgttgcccaggctggtcttgaactcctgaggtcaggcagtccgcccgcctcagcctcccaaagtgctaggattacaggcatgagcgaccgcaccagccttctatttgattttttacattaatggcagttatgacacataaacgggttgtacagctcacaaatgtcttgacctatagcttgaagagcatttgtctaaatgacttgctcaaactacttactcacaaatccgggttctaaagttaggttttttggtttaaaaactgtaggctttttcctcttggttttataattgtgtcagtccaaaaattcttcatttcctaacttttctccatattagctataaatcagaatagttgggaactaaatgggagctttgccaaaggggcaatccccaactacaatgcgttggtctaatattcagtaaaatacattgattttagtaaaattcactgcatattttgcattttactcaaattcaatataaaatagacagtttttttttttttttttttttgagacagagcttggcttttgttgcccaggctggagtgcaatggcgtggtcttggctcactgcaacctctgcctcctgggttcaagcgattgtccttcctcagcctcccaagtagttgggattacaggcacctgccaccatgcccagctaatttttgtattttagtagagacggggtttcaccatgttgaccaggctggtcttgaactcatgacctcaggtgatccgcccccatcggcctcccaaaatactgagattaccccacctggccaacagtctgttcttaaagaaagaaaattaaaataaatataattactagattcagtgtacattttacttttgtgagtatcattcaggaattcttacctcagaaaacctggaaaaggcaagttatttagaaatatgaagaaatcagggtgttttattcttaatgaaagcatgcatcttaatttatctttagaaatgactgggggaagttgattatacaatcaaaatgattaaaattaggcatgtagactttagtgcaagcaaatctgggccactcatttccaggtacatgaggaaatgtactagcacttcttttattactatagctttgaaggcagcgtgttgtcttacttcccattgtttggatttttaaactgataattaaattcatttgcatcactgctgcttggattacaaatacttaaaacaattagttttctgtcagatcacagatctacatcaaatagatgttactttttaaagaataagccctcaccaattagaatgattcaaaagcttttgattgttttctccaaattgttaagtatgcatttgtctttaatgtaaataaatagacttaatggcataaaaagccattctgaattttaaatgaatgacaaaatgtaaatcatgttctggcataatagttttgccaaagtttcaagaaaagaaataggagcattcacaataagcaattgcaagctgtgaaatggcatattaaaacagaggattaagttatttttctagttagtttttggggaaaaaatctccagtcttgcagaaatggctaaataattgcatttggtatggaggctacttttggtcaaaattatgttaataaatatctgagttcctcacattaaagtgaagcaagaatctgtggcatttttttaagtcataaaacatttgtatgttggcttttagatagtaacaagatggcatccatttatctgtatgcttctgcgcatacaaccttatatgacatatgtaccaataaaaaaagtatacatgtattagtaattaaattctagacttgtgctgtccaatttggtagccattagacaatggcaaaaaattattttgaatttaaattagtgaaagtaaaagaaactatgttgttcctccattttgctagctacatttgaagtgctcagtagtcacatggttttagtggccatcgtgttatgtagtgcatgtatagaacattttttgttttttatcaccaccaaaaattctaatggacaatgctggtttagctcttcagtattgcaaactttagcctttaaaagctatttgcaattatttagcgtgtattgtttatgctccaaaatactttcatctcaatgtagaaagaaaacgattgcacttttgaatataagagaaatcaaatccttgatttttttctacataaaaacgtggaatttaaactgaattatttaacaaaaatcaaagtaccttagaaataacctgaaaagaaaaacaaattttagataatatatataattttgaagtagaagaaaactaagataaaacgtactgcatttgtatacttttatagttttctaattattattataattggaaaaaatgaattttaacaaattaggtataattatcactgtggtaagcagtctccagaatggtcccaaattaaggttgtctgattacggaataccatgttcttttaagtccagtaatcccaaccttttctaggataaagcttggtatatggaatcaagatatgtattcttgttattcttctgttaccattactgctgtgggtttcaagaacaggcacatacagtttctccttgtgtgacacaaaccttgtgtgaatactttttggtacgctttcaaactggggcagcactagatgaatgccttttccctaggtatgcctttcagtaaactctccaggtgagaggggtgtagtaagtactgctttacatggatctaagtgacatgatttgatcacagttcaggtggttgtagttatgaaccatttcatgttaaattaaggtttaggggtttattttctaaaataatgctacttacagtgacagcatagcatagaatctacaagttctaaagcaactcaataacttctcttaaatggcccttattattttggattagcattttggatgacaactaactccactccctctcttgaagggaaagagatttggtagaaataattgaatgaatcctggattaatctagaatatgattttatcaatgactgatgaattacactgcactcagttgataacggtgtcttcttctcttagaaatgttgagtttgttcctattattatttcaggagacaaagctttttaaaagagttggtcaactgtagctaggcatgaaagcatggtctctaagaagacacttataattccctaagtatttgattaaaaggaaaacaagtacctcaaaaactcttaagtttatgttataggcaaagaagtccccaaacaatttagtcaacactctgaaataaactcttaagagtggtgattttcacttggcattttggagattccatgtgtggcaatgtgctcctcaatcaaggagttacatttctatgtgcagtaacattgcagttgcacaattaatacaaaaacaaacatatattaatcaatgacaggttttctcattttcatacagagttatgaaacctttaggctaaggaacagaatagtgagaaattagacaactattaataataggattaattagattctggccctacagctaagaaaatggagtgacaatcagaataacaccaaagttttgcaagttgtccaagtgacaaaatacaactaattaatactaataaactaaagtcaaattggactctatttacacaaagtactttttatatacaggcaaaaatttaagtagaaaaattatggcctcccagaactaataccaaaaatttaatggtaagaaaatgaacgtattcatttaatatataaccacatcatttgaaaatattgagctctcattgtaaagacatgacattttctctaaaattaatatattccataaaaatagtttttaaaagagaaaggctttgtcttcattcttttcgtgtgaaggtcaaatatcttagattggaatttaactgcaggaattatgcttctgttcttactttagcaacactaacgatgacattttctgaagtacatattgttaacaccatcatgatgaaagcaaatcatttttctacacttactttgatgctaatcagagcagtcatttaagttgctacatgactctgagacagaaatttcaaaatgaaattgaccaccgattcccagacaaaaccagaatagtggtgtcagatgagaagggttttgcagtgttttgtcacatttcattttgatttttacttttttctctgtttgacatatgttctgaactagagtgccataaagttttatcaccataagtttgaaatgaccacattactcatgagctacagagtcacaagtgagtttttagcttctttcaaagctgtagaaataaaactttatagtaccctaccctggtatatgttgttttatgtgacacattttgttccactttattcttttcttttatttcccttcattattttctttttgaattatagcagaatttgtattaaatttttcctaatacacaacagtttaagctacattttataatatcttatgtatttttttcatacagattatctttgacctgtaatgcccatctcttaaagaaattttagatggtcattataaacaaggttcattgtgaaatatatttctgttgaaacactgattttattacaaaaaggtaatgtttgatttccatgagaaccaaaactattggttgagatatgaaagatgaacatttgcttccctttacacaattgattaaaattcttaatgcatacatagtcacactacacaattagtgtagtacatacatatccgtataacttgagtcttccatgtatatgttatgcaatagaacttctacaaagacatcaatatctcatgctgaaactatccaaactataaaatgattttaggattagcttatcccaaagggaaattgtgagcaatgtggctggcctgacagcctgaagtgatatgctcagagtggatctgataggcagccattcatttcaagctcaggaagcaaacttattattttgtcatacacggtcgtttttccattgaagacattaagacggtaaagaaagtcctcagagtctatggaaaggatcaccagactttcattttatctccagatcttgaactggagcttttgaagattccattttagtgatttctggaaggctgctaatcttaatgaataaagtcagaaacacatgtgtgtggctgattcagattccagaaagaattttggttgctatcatgattatttttaaggcataagtgattaacgctgagatatactgcttttcctatttgtggattaaatttcttctatcggagaagttctaattgaaatgtctccattcaatgtggttgtgcacacacacaagtacacccatgaatgatattttacatatgtaaaaaaagaaaaccgatattaagtaacttctacttttcattatgagacatgctgtgtgtgattttatatatatatatacacatatatatgtatatatgattttcctgtgttttgttaatcattttttatcattttataatttttaccattttcatcattttttattgtgtggctgatatatactagatattactcactcagggaggatacaccctcatctgggcactcttttatacaagttatggcttttgttttaaataattcatctaagtttaatgaaagaaataagtgactgctttatcctagagaagcagcaaagagattttgttcacctgtgcctttagagactacatgacagcctctacaagtagcagggtagaatcaggttgattataaaagccttcatttcatgctaaatggaaaggagaaaagaaagaattttctcctttaattagaatgtggcagtttaatgacagaggcactattgttgtgggttaacatggaatgaaatcaattaaataggactatgtatacttaggtgtctgtaggaatcaccaaaaatgtaactctccaacagtttgctgaatctgcctctgttttgtctggctgctatacttggtatgtgggccatctggctcctggattccagtaaggtttgcatattcacacatcaatcagaagtggtgtagggcctattaggaagcaccagccagttaggtgacatgccaggactgcaaagcactcaagcaggaatgccaagtggggagcttctgctgaagctgacgctgacacgggcattggaggcaccttttgatccgtctagctttactgttgatgtcacagtcctgctagatcaggcatagggatgtcaggtcacgtaaggcctcatttatgtcattggttttgcctggataattcaaatggagcaaaaataaaagtgatcttgatccttaggtcccatgacttttgatagtagaaggatcattgatctgaaattgtcttgcattcctgactagtagacagaaagatatcagaagcaactttgtctattctgtttctagaactatattgtgggtactagtttttcacagtagtactagacatttcagaaacagctaccgaataatctttccaaataaagggaaaggttgtaataaaatgcattcccattccctatgtcttctcaaacagttcactgaaacttaaagggatgagcacactttacaagaaatgcaaataaccttttagttcactgaaataagataaacaacacatgtgtgtatttttaattggaagctctatcattcagttccttgaactaacagctactatacttttcttttgatgtatgcttcacagatatccattgcaagttttagattgtttgcttcaatgtagataagacaaattaactgaaaacttaaaaagcacctagaggattggttattttaatgttttttagacctctggatgctttgatcccatacagaataggatgaaattccactataatggcattgttttaaaatttgaattggccgtaatgtgttgtgtgtgcacacatttatctagctatgaacacaattaatactcactgagagagctctttaaaatgatgacataatttttttctttgaaaagttatttcttacgccctaaatttctaaagtcaccaaaaaaaggtaattttctatatgtaagacttatttatagtaactaaatttctaagtaactgatatctcctaaacagaaatgtctaataacttacttctagatcagctttaacaatggttttgatttatctaacttagtgcagtaatacaaatattagtagtaaaataatacaagtttaactaacttggtataataataggaataatataattgctcatgtttgatgtatgctaactacttggcaccattaagtacatcacatgtattatttcacttttctcattaaaatagcagtgtgatgctattatctccattttacagagagggaaagtgaggcatggagagaagtcgcaatttagaaaagtaataagtataatacttattttaattttaaattattctttgctagaggaaagatgcatgttccttggacatcttctatactttaataatattatttctatgtttctagcaacccccacaatgaaaagcaaatacacgatgcctttgggggacaaagcagttctgtagtcaggcccacacatgaagtgttttacctttataggtttcaacaattaattggaataagctattttttctgttttggcatctgtctacttggcaaggcccccaactgtggtgttggcagctgcatgacagcgactgcctctggtttttccacagcaactggctgaaactcgcctccctgggctgtcctattatgttgaaaattattttctttgactcaaatcagaagagtgtaatagaaattgtgaaaattcctgacatcttcccaaagatgtttttgaaataggttaaggttctccgggagtaaacttggattctaaatatgattttttttttctgacagatgtatgcatgtgttatggtaggtattcagaaatgaatgctctcatttgtaaaataaaataaaataatcccaaactcttaactatagcaatttgtggttttaatcgttttcccttgtaaatggaaacttggtaagttttagagtgcattgtacatgataaaatacatcttatgtctaaaatcttagaaaatattatcttgcattggggaaaacatcataatagtgcatatgtgattcattttatgtaaagtcctaaaattatctaaattaaaatatctatattctatagctgtgcatgtgtgtatgcacacacaagaatatacacatctgcattttatatagatacaagtatattgaaaggatgatacattcttatacagatgtagagcttaggatttctttatcaatataagatagaaactgcgaaagcatgaaaatgaaattaagcatacttcctttattcacttatcacccgttttcagaattagttgccctatgggtaggtaccttttaaattatattgtacatctttcaattaaatatcgggaggttgaaaattaagtgacaattctaatatttctagtggaagacctgaagctgcactattaaaaagctagtaaatggaaggggaaggatatttctttatccatggagttaattacacaagcagtacactatgtaagtgctaggagaaaaggtgatacaaacactacttaaaaggtttccagcgagaagcagctctgaacaaagtagatttaaagtgttacctccttactcctacaaattctaatgggaatcaattatgttccatgagtaataataataattaatatttatggaagtgcttactatatgcttggctctgaaataagggcttcacatattatagcacataactatcctaagtagaagatactatttttacttccctttttatagatagggaaagtaaaacacagaggtgggccgggcacggtggctcactcctacaatcccagcactttgggcggccaaagcgggtggatcacctgaggtcaagagtttgagaccagcctggccaacatgacaaaaccctgtctctactaaaaatacaaaaattagccgggtgtggtggtgggtgcctgtaatcccagctacttgggaggctgaggcaggagaatcgcttgaacctgggaggcggaagttgcagtgagccgagatggcgccattgcgctccagcctggggaacaggaaggaaactccatctcaaataagtaaataaataaatagcacagaggttaaataactctcctacactcacacactccatgtgtctctggtgatcacttggtaccacttcttttcttgcatgtctcacctctcttataaacacattaccaattttaaatgggtgttatgaactatgtgtattaattatggctgagaaccaccatttttaataacatggaattttctttagctggcagggaaggaatgcttccagtttaaaaaaaacggtaaaggacatagctttaaacagaaaagacgctttgaagataagttcatgtccataaagtccattcaaataacttagtaaattgctgataaggtcatatcatgtagcattttttaaaaataagattgctgaaagttcagcttgctctgagtaaacacagagcaagatgattctcaattatatagtgaataaaatcaataagaacatctagtgaaatccaaacagaaaataaaaaaatcaaaattgacttttaaaaaaattgacattttatggagataattgtagatacatatacagttaataagaaataatacggatatcctatgtacactttaccattttttccctaaagttaatattttgcaaaactataatataatatcacagccagaatattgacattactacaattcagcaattttattcagtttctctcggtgttcctatatgtgtgtgtgtgtgtgtgtgtgtgtgtgtgtgtgtgtgtgtgtgtgtatttagttctgtacagtttcatcacatgtgcaggtgtaggggaattggatatcacctccaatcccccttttagttcttagtaggctcttcagttggatctagaaaccaaatcgacatcaggcagaaaacaaaagaaaagaatacaaattgtattacttatacatgtacgtggagatcatcacaagaaagtgaagcctgaagaagtagtcaaagcaagatgcttttaatgatgaatgatgaatttgatgaatttggaaagcaatgacaggataaagagaatctggctagggacagtaaattttctctaggggagtcactaggagatagatagtgggtataaaactagtgaaagataagggttacttcagtaaatatatttattcaggtccattgaagcctccaattctaagtctctggtaataagggctattttctcactctggtcctgtgagggtgcccctcccagaggaatctttatggtttgctgcatgtaggaagagacaggtgagctaactctttctgaaactacaatttctccaaagtttccaactgaaaatagccaacataccaatctggcatatttggggatggaacatcctttactccttcacaggtatctgtggatgagagctgaagcaggcccaccaggaacagagagtgtttccccttactgttggcaattctctggattgcatctacccatcctgtcctagaaagtgtcaggagaacctgatgttgtctcagggaatcctcttagatgtggagagataagcctttctaggctgctttcgactgctggttgtgggtctcgaaatggtgagtctgggtcacttgcttctattaagtgaaaagatgtaagtcactcaacttctgctccagacccagtaaaccaaaactccgtcgtcttcttctgactaccttcagagttatcttgggtttattcctgcattattaccagcatttgttgctgttttagtgggaagaggaagggaaaaatgggtcgaagttatcttacccttaccagaagttcctaaatagactttttcatgagaaagaatatttttaaaaaactgtttatattataaatattcttggtagtttttttgctgttacatattttttaaaaatccatagtgcagatataataaaaactattgcaggtatttaaattaacagaactagttgaattcctacaacgtgtcatgtacagtgctaggttggttgatctgtctgtgcttctgctttacttggaatggatgagcaaaggcttatactaatttgcacttagtattataatgaggtgtgagaaaccaattttcatattcaagtgtctataaaaagtgactatttttcaacagttagctcctttaattataaaatcagtttttattaaaggcagttgatgctttgtgtgttgttgctagggtgacatatattatagaaacatacagtttatctttccagtaagagggaatacagtctctatcttaccgttaatactttaattagagaatgatcgacagaaaaatcttttttctcttcatgagatttgaaaaatgcatatcttctttatctgcatttaatcaaccctgggttcattaggatttgttgtgttggcacctgagaacatcttagaaattattaaataattcattttctgctttttttctttattttttatttccagcagaggcttgtattaaggagattctcttttgacatacccccacatacattcacactaatatatatgcactattttcaactgacatgttttagagttattgagatattaattttataggatactatcacattttatagctcttagtaaatagtatggtatttcaaaacataatttagttatagtaatagaaataatccatcatatttgttgtatttataaaatgtcttcaaaaatatcatataaatgatatctgaaattttgtcctagtcttgcaaatgctaggggattaatattaataaggttgttgtcaatataaatttctagtgagatgctcattaactggaaatccagtgctagagagacatttcagaatacctaaaccttatttagagacaaataaacatactagttaatatggctattgctatgaaccgcataaaattgaaatttgcccgaactcattcagctaagcatgctaacctcggctttggaaaagattgaatggcctatcatcagtcaatcttggtactagagttaaaagaagaggcaagtaatatggacagcacaaggaaaatgacagaaatagcggcttgtgatgataattagcaagaagtttgaataagcaaactctaaagaatattgaaaatgagacaaaaactgttaatgtatatgcaattaaatctttggaccctccttgcttgttgtttcaaatatccaattgtggagagaactacgctagggtaataatattgcccgttttccctgtccctccatgtactccaattaagaaagcagaaatgaaccatctaccctgatttttggaggaggaattgagtaggtatggcttcatgctctttaaattggggttaagcccccatgatataaattatatagggaatgcttcttcttccatttaatgcttactaatggatgtcactaggcaaattattagcaaacatacataataagaagacttaatgctatgttcgctgataacagctttatcattagtaaaggagatattttcatctctattcgtctgactcctatatgtgcggcttaattgattacgaacctaggtggggaatagatttaataattttctcaaactccatctataagtaatatgaagacatgataaatttttaagcagaaaaatgaaatgaaaaatattatgattcggaaaatttgtttccttgtactatgaaggatacttgggagcaggttggagaagagggtgaaggaaccgtttgggggacgcgtcagtaaaactggtggtagagactaggctgaaggatgatagtgggaatggaaaagtgaagacatttgaagggaagaagacattgtgtcggagttctaacgatgttcatttgtgcataaaacttgcatttgtctatcttattgtactttatatattcttcctaataccctgtactccattttactcctttttttttttttttttttttttttgagacagagtctggctctgtcgcccaagcaggagtggtgcagtggcgcgatctcggttcactgcaacctccgcctcctgggttcaagcattcctcgcgcctcagcctcccgagtagctgggattacaggcgcctgctactacaccagcctaatttttctgtttttagtagagacggagtttcaccacgttggccaggctggtctcaaactcctgacctcaagtgatctgcccgcctcggcctcccaaagtgctgggattacaggcgtgaaccacctcgcctggcccctgtaccccattttcaatatggcaaatggaataaatgtttttacaacatttatttgactgttgtttataactcttcaatagctgtccattactgtaaagtttatgccacaacctatagggctctaccttttaacagctatctctttctgattttccacttctctccaacctccctccctaaattacggtgatactgattttcttttaaaatacaggactactatcagcctcctttttcatcttttaggccacaacttaatgtttcttcctcagagaaatttctaaaggacccaaacccacaatagcttctatatgagactacttctcccattatatatcttccaggtatcctgtaatctcctttacaacagccagcagaattgaagtacactatttgtcaaccaaaggtgtgaagcttcttcttactcctggtgtttgtggttttattgactcttctttgttttctttaccagtgagatcccatctacatctttcagtattttcaccagtatcttggtcttttgcttgcttgctttcttgttttctaggttgattataattttattcctctaaacacatgaataccttccgtcattccaatggaattttggacaaaagggaaaaagttataagtgccaatttggttgccatgaaccaaaacagaaaattaaatacaattgcctagataatcaggcccaatttgtattacctagtatgaaaaacactttggtaacaacagtaggtcatgttaaactaattaatttctaggaacattgataaattaaacattggttactctccagagtaactctaagcccagaaaataagtgacttgtacatccatcatctgattcaggttcaaagagagtttctttattttggcaaagccaactttactgaaatgagatgagaagatttctgttgccaatttataatggagattaaaaataagaccccattgtcagagttggagatcatatgttggtaattgtggttttgtacaaaattaagaattgatccctaagaacttgtaaattataaagactttgtttagctcagtcacatttgcctaatctaagatttctgtctaggagaaataattttctagatggagtcaactagtacacctagtttaagtcttctttatgtgagattgtgtttaaaacagtgactcttttggccatagttacaatgagttcttcaagggttgtgtatttgcagactatcagtggaaagcacttgaatggcaatagttggaaattttgaagcaaaggaaataaaattgttacttgaaaccttgtaaaaagatcatacggccgggcgcagtgtctcatgcctgtaatcccagcactttgggaggcccagacaggtggatcatttgaggtcaggagttggagaccaacctggccaacatggtgaaacccgtctctactaaaaatataaaaattagttcagtgtaatggcgcacgcctgtaatcccagctactcaggaggctgaggtgggggaatcacttgagcctgggaggcggaggttgcatcgagccgagattgcaccactgcactccaatctgggtgagagagtgagaccctgtctcaaaaaaaaagataaatttttaaaaatccatgcaaagagcttgctattttgctattttagggagggagcatgagcttcatactcacttggaatttcctgagataaaggcagaaatagaattggaaaatatttaatataaatctgaaaagataaggcatttctcttagaagaagtttctaagcaaggcagctatatagcaaagggtgaggtatatatccctggctgcctcttagcacagggaactggcaccacggggcctacactggcccaagagttcttcaaagataattgtgttcccacaacttttctctgtgtagtaaactcttcctgccctgtagcagtccgcccagttcatgaaaaccatgggatttgacccactgaagaagacttttctcttaaagtttttcctgtttatccaggttttacccagtaaaggtcagctataactggtaatagttttgtcaatgtttccataccttgggacaaagttccttatttgctcggtatttcctctcaagttttacttggcattttgaaatttgaaaaaaattctatgtttttcctggctgtgaaaatgtattttttctttagtatttgatattcaatttataaaataagacttaaagcagctagatatttgcccatcgttatgtttagtggaatgaagaactaatcagctactactagtcttgttccaattaacattctattcctccatttccttcccacactgatatatgtacatatatagatatcagtgtgatatatatatatatcacacatacatatgctcatatatacatatatatcttatataagtctttgacctttctaagggtcaaacaccatgtttttcacaatctaggcaagctgctacaaggaaggaagagtctattatacacagaaaagctgcaggagcacaattatctttgacaatacaccttatattggtattttattttttttctgaaattactctgggttgagtcttatatttagtttctaattgtgaaggaaagccctgtaatgacctggtgatccatcttctttagaaccaagtcggccacagtcctaaaataaacatctgaaggcataggaacatttacagatgaaaatcataatttaatcaattgggtgtattatcttattttctaaatatgtatacattatttctttttttcttttttgtgagatggagtcttgctctgtcactcaggctggagtgcagtggcatgatctcggctcaatgcaacctccgcctcctgggttcaagcgattctcctgtctcaacctcctgagcagctgggactataggggtgtgccaccatgcccggttaatttttgtatttttattgtaacagtggagatggggttttgccacgttggccaggctggtctcaaactcctgacctcaagcgatccgccccaccttggactcccaatgtgttgggattacaggtgtgagccaccacgccaggctaccgtgtttcttttaaaaactttttttcttctatgtaccgtataggttttaaccctgtaagactgaacaccctcttttgtaagacatattttgtaatactcccattactatcctcaaagagaatttaccaaaaatgtaacttacatatatatataaaattctaaaacaattaccttgtaaaaaataaatcaaaggacaataatgaattaaaaataatggatatatttatcatcaataattaattattcaatatgaaaataagaaaggtacatactgctctagataaatgtagtacctgtacctaaaaccacagaagtagacagctcgaaatgctgacgtatgcaggtgagtggtatgaatgattaaaatgccatgaacagcatattttaaagtaatgggatttttctgtatgattaataacatttggtaaagttctgaataaaataagtgcacattttccctttgatttattgtgggatagtttcattcttggaaaatgcagtgcatataaagactttgtatttatatgtaaaattgagctaggttctatatattcacatacttataaacaggctgtcccctacttttcaaaagctgaataggacatgaaacaattactcattttcctggactttcctgcgtgttactggatgtctggcgtccttagagcacctttccatccgttatggggacaatcacagtgctttcacgtttcttaaatgtacccagggtatggtggtgtgcccagttgagaggaactgcaagtgagggttgtatttttttttttttgagacgagtctcgttctattaccaaagctggagtgcagaggcgcgatctcaattcactgcaacctccgcctcccagcttcaagcgattctcctgcctcagcctcccgagtagctgggattacaggcttgcgccaccacacccagctaatttttgtatttttagtagagatggggtttcaccatgttggccagactggtcacaaacttctgacctcaaatgatccacctacctcggcctcccaaagtgctaggattacaagcatgagccaccgtgccaggccagggattgcatttttgcatcgaagtagcagaaactagaaccagaggattttaactttctcatatgatggaatctgaaggaatggagtctaaagcaagaaactggccctgtgatggcatgaaaatcccaggcccctttgatcttcttgctcttttacaccttactatcattctcatgcttgtcaactcttggttgcaagatgatggtttcaacatctccagcctcaagtcttacatttcagagcagaaagatgaaaaaggaagcaagaagaaggaagaggcagcatgtacatcaggaaaacaaaactatcccagaaatccctagctgtcgtcctctcagatgccaaaaggccatgactgggtgccagagatgcttgaaatagagctctttgttcttgcttgacaccttgctacttctaaacaaaatcacgattttgttgttgagagaaaaaggactcctccctatctacttgtcctgagactgcttcagcctctcagcttcctagaccctcatgcagttgatttccaattcttccaggagctggcttactgtctactttttcagggtttcaaaaaaaaaaaaaaaaaaaaaaagcattttttaaagtttaaaaagcaaaatgtggagtgaatattttttggttactatgctttttaaatttttagaatttgtttttactgtgggttggctgttaatagtccatcaagacaactatttctttgctgggtttattggatattgggcaagcaaacaagcaaatagcagtatctgccactggatgtaatcaggaagaaattttcagaaaaaaaaaatgatgcttcaaggtctagataagcagattttccactggttcctgattattctaaataaaatgtttagtcagtggttgtgtaagtttcaaggatgttatagatggctcttgaaaacaataacacattaacctaatattttcagtactcctttttctagcttcatttatcctctcccatgcctgtaaacatgttactttgttaaccaaataaagtcattaatacatgagaccattttgccaaaagtaaacttaaaattaggaggaattggtctttcagaaggcaagaagagaccaagatgaaaggaagtcatttttgtgaaccatatgttttgacccagaagaactatttcacagcctttctcctggtagcaaacaatgagggaaacagtttcttaccatctgcacaataaaacttgttgaatcactcgggaattgggattattgctactgtttgtttgttgttaagccttaaatttaaaaaaagacaggatatataagcagggttggttctaatactgaaataaaacaaaaatgaacaaacccagagaaatctgcttccaaaaagccacagcacaacaaaaagaggtgtaaacatcagaagacctcaagggaaaaatacgtttatttagaaatgggatatcctggggattttgttacagcagctttattaagatattattcacatactgtaaaattcactctctagaagtgtacaattcagtgttttttcagtatgttcacagagctatgcaactatcatcactatctagttgcagaatactttcatcatccccaaaagaaactgtatgcccattagcagtcactccccattcctctctccctctagcctctggcaaccgctactctgtgttgtgtctctatagatctgcctattttggacatttcatataaatggaatcatactatatgtggcctctagtgtctgtaatctttcattttgcataatgtttttaaggtccattcatattgtagaatgtatcagtctttcattccttttatttgctaaataaaatttcattgtatggatataccaaattttgtttgtccatttatcaccagtttacgggtattcgtaaggcttttttttcccactttttgcttccagtagactttttgtatgtcacaaatggccatatgtttctttatcccataatcagaataaaaattatcattcttttagtggacgtgcctttttttaatcaaggcacagaaataaaaaagtgagttgtattttctcattaagaaaacattttggggtgtgcatgttttcagttgtttggaaatatgtagacatattggcagggtatcccacttacttttgctgtgtataaaatcaccctgatacttagcagtttaaaacaattactttattatgccgtggatgctgtgagtaataaattcagataggacacagcagggatgttctgtttatgctctgcaatatctatagcctcatctgtcaagacttgaaagctaagttggactcaatggctggagggtggaattctgaaggcctacatgtgaacttgctatgttgtttggcttcttcctagcatggtggctttacgatactcacacattttctatggtaactcagggttccaagcaaacgctgttctagcaaacaaggtagtagtcatatggtcttttatgaccctgccatggagggcacaaaacattactcttgccatcctctatctgttgaagtagttacaaactcacccagattgaagaggaaaggacatagaccctacctttccatttgccaatgagttttgggaccatattttaaaaccattgtgccataaagggcatgttttatgacaggtgaagctttacgtcttaaaagtatataattacaaatgattaaatttaaaatcacgagaataaaccattgcattcatctaccatcttgccactaaatcagaatcagtaaaacaaggtcaaattgactagaagccacatatagttgacatttggaagaatttgacagaaatatggctcaattggagttactgaatttaaaccaaaacgtttggcaccaagaatcatgggagcccagactaaagaggaaacatacattatatagctcttattatctaatggtgaaaatcctatcaaatctccacaaaggtggtgaactctggtcttccatggcatcctagacaaactttatttacaggcatgtatggtatataaaataggcatagataataaatataataatccagaacaatgataaaacagctactatgtcaaggtaccatcctaacctcacttataatcaggcattaaattctcataagaatcctatgaattagacaccattattatccatatttaacatatggaaagaaactaaagtacggagatgctaatgaacttacccatcgtcccactaataaatgttaaagtcaggatttgaacctagatgctcaggctccaaagcctatgctcaaaactcttgctatgtgaatactggcatattactgaataaaatagccccagttttgtttttaaataaaaaatgttgatcaatttttttcaataaaatattgtttcatcacaataagacctacttattttcctcctgagcagtttttagtgacatcaataacaatttttttaggctgggcacagtggctcatgcctgtaatcccagcactttaggaggccaaggtgggcagatcacttgagctcaggagtttgaggcaagccagggtaacatggcaaaacctcacctctataaaaaaaatacaaaaattaacagagcgtcgtggtgcatgcctgtattcccagctacttgggaggctgaggtaggaggatctcttgagcccgggaggtcaaggctgcagtgagccatcattgcaccatcgcactccagcctgggctacagagcaagaccctatcttaaaaaaaaccaaaaaaattataagcgagtcatacaagttcttcacagcttttcattatggtaaaccttgattaaaagccaaggttataaatgtaatttttgctaagtgcggatgtattgtatctgtagcaaactgtaattcaggcccctgaatgtaacatcctagctctcattccttttgctgtcagatttccctatagataacgtctacatctgctaccttatctactcgcaaatatttatgattttcttccatgaaatttacttttctcccctgaacctgtaagccaaatcaagtgaccttttgtgaatctcaaacctctgtgaattttaggtagatttaatattcttggccaccactttctattcagtcaaattcaagaattctataaagttaaatatatatggatgtgtgcacacatatatatatatgtgtgtgtctctaggtcatgaatcttttaatactatagaacatagaacatagaaaattataagagaaattaaaatatattgtcaatttaaaagcataccgaaaacatgttatatgagaatggaataatacaaattattggtatggggagaagaatcatgaatagtttcatgaggaatgtggcatgtgtaacaggcattaaatatgattaagaactaacactgagtatatacaagttagctgtatcaataaaaatgtaaatcattcagcaataaactataaagttatttttactccataagggtttttttccctgaaattttcggcccaaagtgactgttttttcttcacatgccacttatatagtgtgaccaagtatttagttaaaaaaattattctccagtcaaatcatttgttgtacacttcttggagctgtggcttgcttgtgtttttattgattaaaaaatacagcacaatcttgcacctaataaaaacctaacaaactggctgagtgcggtggctcacgcttgtaatcccagcactttgggaggccaaggcaagcggatgactggaagtcaagagttcaagaccagcctggccaacatggtgaaaccccatctctactaaaaatacaaaaattagcctgacctggtggcaggcatctgtaatcccagctactcaggaggctgaggcaggagaatcacttgaacccgggaggcagaggttgccatgagccgaaattgcgccactgcactccagcctgggcaacaagagtgaacctctgtctcaaaaaggaaaaaacaacaacaataacagaagaaacccagtaaataataggaaaaaagtgaatatagaaaagtaatagaaaatggttgcctttgtgaggttagatgtaaccaaaatattttagcaattgtttagaacaaatagattaaatgaaaaatatttccattaatattttaaactgttaaattctgtctaatttcacatggtagatacacattcattaagacttttcagtgttaagactaaataaagaaaaagaaaattcttcttattgtgccttattcagaatccactgaatttcgttattatttttattatcattatcattatcattatcagtattatttgagatggagtctcgctctgtcacccaggctggagtgcagtggcgccatcttggctcactgcaacctccgcctcccgggttcaagcgattctcctgcctcagcctcctggggagctaggattacaggtgtgcgccaccatgtccagctaatttttgtatttttagtatcttatttttgtgggtacacaatagatatatatatttatggggtacatgagatgttttgatacagacatgcaatgtgaaataatcacatcatggagaatgggatatacacccctcaagcatttatccttcatgttacaagcaatccaattacactcttttagttatttttaaatttacaattaagttattattgactatacttaccctgttgtgctatcaaataggtcttattctttagcaaagcatatttgtaaagagtttggagtttctctttgctttacacactgtaaaaaaaaatgtcaaacaaggttatccaaagagtagtaggagaatgagcattgagatcataagtgtctcatctgatcaaagttattcaagaatgaatgcattttggaggcaagagttgaggaccatcgccatcattgactatggagtaacacaagcccagactcttgagattaatttggcattatctttcaaaattaaaagtataattacatatttacatagcaattctacttcaaggagtttgcccttcatttatgttttcacatgagtaagggtttagatggacatgggttttctttgtagctaggtaatagtaaaataggtaatctaaatggacatagcttggtggtagtccatgcctgtgccctttatactacagttttaaacaagagatgaatttatataaacagatgttgaaatgtgatcgttatgtagtattaattgcacaaaagtagaacatatatatgtgcatatgtatgcatacatacatgtacatacatatgtgcatatgtgttctagtttattatatatatgtcaaattgttctatttgtatgaaaacactataaatacatacataataaataaacaaatatgcgtttgtgccaaaaagcacagaacatttctgtttagtctcataccactcattttatagctttatagataggaagaaggtagactttgatggtacttgaatttttatctatgtatctgggcaagtattttatctatgtatgtggtagcatattttatctatgtatgtggtacatacatgttttatgtatatgtatgtatacatgcatatatgtatgtataaaatacatacatattttatctatgtatgtggtagcacgtgagagaatttttgttaatttatatgttatttcacttcaaaaattgataaactgtgtgtgtgtacatatatgggtggtggctatatacatatagatattatatttctgggtggtttataaagagcagaaatgtgttgctcctagttctagaggctggtgagtccaaaagtcaccagcatgttaggtgtcttgtgagcccgcttcctcagtgacgttcatcttgttgatgattcctcacatggtggaggggaaagggagcgttctaggttctttttttttttttttttttttttttttttgagacagaatctcattctgtctcccaggctggagggcagtggcacgatcttggctcactgcaacctctgcctccgggtttcaagcaattctctgcctcagcctcccaagtagctgggattataggcacccaccaccacgcctggctaattttttgtatttttagtagaggtggggtttcaccattttggccaggctggtcttgaactcctgacctcgtgatccacccaccctggcctcccaaagtgctgggattacaggtgtgagccaccgcgcctggcctgtaggttctcttttacgaggcaactaattccaataatgagagctccatcctcgtgacctaatcacctcccaaaaagccccaaacccatctcctaatactatcactttgggagttaggatttcaacatatgaattttgggtggacacaaacattcattcaataacagtgactatactatcctatgttaacattttactattttcaaagcttttgttcactttgtatatatgcatttatttatctttgtagcaaatgaaggataaaaatatcttttggagtattatcttgacatactctccagctgctagggatgacctgtcagtattgaccccttgggctgaagcaattcgatcctctcaaaactcaaattgaagtgagaactatctcttctcctttatttcctttcaccagaaatagctatttcatgttttaaaacaactggaaggtaactgaaaactttcagtggtgttaaatcactgtcagaaaaaaaaaaaaaatctgtttgaaagttggaaacagctcaagtaaagccatttaatctgaccagcataagcagattctgaagaaaatggtgaagaatatcattagcagcaatgcacacagtcatttattcattcaacagatgaacatttgatgaacacttactggttcttggggactatactccatgcctaaaatacaaagatgaacgaagacccaattcttgctctcaagaaaatgatagtctgttaagaagaatttactggaagatagataagtataatactgaaaagtgtgaagaatgaaacaataagatgtgcaaagtacagtgctgtcacaaaagagagagaaataaaagctaactggacaggtcagaagaggcttcacatggcactgtcttgaagaatgcatagaaatattctacaaccagcaacttccaattcagttgaactatctccatgcttcctgttcaaccgagattacattttcaatcttgtttctaaaggaaggaaaaaaagatgagtcatttggtacaaaaaagcaagaacagctatagtctacactataagataaatgtagggtactctttaaatctagtggacgctgtccgtaccctttcagcgctcccattttgtctcatcatctaattgcgtgcacctgaagactttctctgatgggtttgccactgcggggaaggctagaagtgctggaatattgaagacccaagcagcattcttcaggttaataatagatgagaattggatgataaaaactctaaactttttacactcaaataggatgcatgaggcatgtctatttcatttgctagaagtctccagtggcattaagtcccagtcatccatagtcataacttgctcattaatgtactctgtgtgttcctttcttctctatctcacttctctacttcctgttgatgctttctgtgatctccatcacagatcttcctgtttctcacttcctgttgatgctttctgtgatctccatcataatcagctacatggactcaaatttgtcatttaagtctgatcttggggaatccaattttagacattgagcaatggactggctgggagggatgaaagaggagacaaaggggctcctatgttcctggttcaggaaacggatgaataacatcaccagttagtgaataggcactgcctttcagtacctacgggagtgctttgttcagtacatatcctgcccagccaagcactgaagaattcatgaattttattgtaacctaaactgcctgtggcattatgaacctgtgtaatcatgggtagtgttggctttataccaggattttgctagcttgttagcatctccatgtgcatttgcaagaccttggccactcttcagtgttttctactccaatttgcatcattgtccctgcaggatgtttatcactcagacattctgaaatttggactgatgcttgacttagctctgtgattggatgcttctcccagaacctttctcacctctatcagctacgctaatgataatctagacagaggtttccctccacgggtgctgcagctcaaactgtgccctagaccactgtcagtcaacctcttcaatgccactgtttggtgctttgcttggttctttcagtctgcatgaagtcgcagctactcaacttacatccatgaagcagcaaggggaaacttcccattctcagtgttttaatctgttctctgttataaaggaggcatagtagagttgctggaccccaaagagtgacttgtaataaaataattctttaaaatgtatacatagatcttgtatcccagggcacacatttgacatgaaaatggctgttttggttgtaagtgcaggtaacagccatcaaggtgtacttgggactcctcctccactccaaatcttaggcctcattattatttagtttatcctgtctgtatctgcaagatgatttttacgtgagaacactagacttaccccttgacactgtgctttttgcagctcctcatatttgatgggcatgaaagctaatatgttgtctaattatggagagttttaagttattaattttatttttatcaggagatccttaaccccctatacaaattagatctaaatagatactaaaagatgaagttaatatttaactcctttacccaccagatgtagctgaatctttgcattggacaagtgagaatcctacttactctgaatcttagatactttgctttgagtatgattcaatgtcactgttgctacagaagtataaatgatggttatttatgcttgcatgttttccagaaagttaaagactattttattatattggctttctgattacttgactgaagttcataaactaacaaataaaaatctaaaaacactctctggggacctagacaaactataatgattaaagcatatagttactttgaagccaagatgaggtaaaggggataacttaagacatatttattcttaggctgacatatcttgtcattattatgttacaggtgcacatggaccatttattttttctcttatgaagaatttcaaacatatacaaaataaaaaagtaacataatgcataccatacactgctcattagctctaaccattattatcattaccatctggtttcctctctacctacccacttcctattctctgttttgaggcaaatccccgaaagtatatcacttctactctaaacatttcagactgtattcccaagtaacccccccaccccacttcttttttttttttttttgagacagagtctcgctctgtcacccaggctggagtgcagtggcacgatcttggctcactgcaacctccgcctcccaggttcaaatgattctcctgcctcagcctcccgagtagctgctactacaggcatgcgccaccacacccggataatttttttgtatttttagtacagatgggatttcaccatgttggtcaggctggtcttgaactcctgacctcaaatgatccgcccaccttggcccctcaaagtgctgagattacaggcgtgagccaccgcacccagccccggaaaatatttgcttaatatcatcaaatacattttatatttcccaaattatcctataggactcctctcttctctctgttgtctctgtttcctccacaccctacatcctcctcctccctcatcctcgttctcactctcccttttcatttttgaagaaacaggaccttttgtctaggtttgttgattacatccacatgatattgtttaatgtgtttcaccagctcctgtggtgctgacaaattagcagctaagtctagagagctacttgtagtcagtttgattttgttctttttttactcaagatgattgtatagaaagtgttgtgtactttcaacaaaaggtatataacgtttgatattggcagccattgatgatcattgttttgattgattatttcattatgagttgcaaaacaatgatatactgtttttacttcttcatttgttaggaggagcagttctataaagagaactttttgttttgttttgattttttgtttttgagacagagtcttgctctgtcacccaggctggagtgcagtggcataatctcggctcactgcaacctctgcctcccaggttcaagcaattctcctgcctcagcctccctagtagctgggattacaggcgcacgccaccacgcccggctaatttttgtatttttagtagagatgggattctgccatgttggccaggctggtctcaaactcctgacctcaggtgatccacccacctttgctttccaaagtgctgggattacaggtgtgagtcactgagcccggcttataaagagaactctgcatttctatttggttgcctcatagtataattgatacaaagcaaagcagagtaaatgcttcagtttttcccccaaaagaacaattttcaaaataatgaattgcttctctagtctcttccaaaagttgccagtgaattttttttttttttttttttgagatggagtcttgctctgtcaccaggctggagtgcagcagcgtgatcttggctcacttgcaacctccacctctcaggttcaagggattctcctgcctcatcctcccgaatagctgggactacagacgcgcaccaccacgcccagctaatttttgtatttttagtagagacggggtttcaccatgatgttggccaggacggtctcgatctcttgacctcgtgatctgcccacctcagcctcccaaagtgctgggattacaggcgtgagccaccgcacccgaccaccagtgaatattttatttatttattatcatccagttgtttgttttggcatcactgcgaatgcatgaatttaaatatatttaaatgtaactgaggctctccaccttctgtattatgatctttattgtcctcatatttttcatctttatgcgatggaagcctcctttacattgacctcctgagtcctttctgtatgacctttatacactttggttgaccccaacttctcttgtagatcaccagtgggcattcctgaggtgtgggtataacatttatctctggattatttattcattcagaaactttacttagtaattaacatttactaggcgttaacaaggaagcagtaaagcagcaaacatgctcatttcaatatttggattaatacaatcaatcaaaacagtagttattgacaacttacttattgtgtggttagcacactcaaaatttatgcagagaaaaaagatgagagattagacctcctccttactgtaacacattttcaatctgaccagagattttgcttctgcaaatttggatgcctagcattggcatcatcaagactttcatagctatggaaccatcagatataaaatacaccttagtatgcaacctcaacgtgttcttcctcttgcaattgaggttatattaatttattaagttcattttgggataaagaagacagaatcatagttctttcagcctgttattataacactttattatcctttacctccttccaatttttgtgtctaataattcgtgtgcatgtgaactgtcttcacttttgagttttattatgaaactcaaactacaatacacatgtatgcataaatttctgtatatgtggcatgcgtgtatatgtgtgtatgtatgtgaatatataaatttcgttgaatagagtggtatgattgtctttggcctccttaattatatatattagcatatgttctagggctcctgacgcttcttgcaggcagaaggcatttccagaggttgtgtagatccatgaaggacagttatcgggtcacatctcacatcatcactgtttctttcttgcccctgtcttacactagtacccttcagggtattgtatgaaagcttcattggttcaaattcattttgtcctctagtgctactttctatgctgacaaaagcatagtgaaactgatgccctggcttgtactgcagtaatattgcctccaagcatatcaagtacaggaagttaaatcctatatattattaagccagatcagtaacatgtacccaacaatgtggtgagacatattttgttttaataaaacgatgatgttacaaattcttcaaccttcccatatgtgtggaggtgtgtgtgaatgtctgtattaatctaccccatgtctcctggatagagtttttctacaaagaaccaagctcagcttcccctagtgttaagacattttgcttcatgcttggtatagtgtagtgctactcaaacctgagtaataaacaggccagtttaaagaaataaaaagccctatgctcaaccaatgctgattaaaattatttttattaaaatttacctatagaagcacgaatataaaacaaagggcacactctttatggtgaaagggcatatagatctacaacaacaaatcatattttcaaatcaaataaaacagaagtacagaaaagcaatagaactcaaaagcataaccttaatgtgtctgccaatgttgtcttggatacattaaatggccttttataatgtgaatatagtactagctgcaatggtgcaagttattgtatttttagcatttttcaatatatgttgtgaagactattttactgcttttctctattcagatctttgcaaaaaaactcatgtatacactataatcatgttttttgccattttgtagtcctatgcttttgtgtcatcagccttccccagctagaaaagtataatattctattattgtatgctgttgtcattttcccacaatcaaaagtacaaattattaaggaaactgaagtttcggtctaaaatgtgttgttcagatgaaattatccataagaaattaaagttgtgttcttataactggaaaaagaacttaacgcaagtataatatgtgcaaaactgggatgacttagttcttgctatcattaagaggggacaaatggcaacgagacgagctttaacagctgagaaaatcttatgcctagatgtacataggcctggaaattacatagcagtaaaactgtaccttcaaatagctcaaaagcagctcataataactgcttgagattatctcagtgataaagtcagtataacatagtgttttttattttaaaaaggaaaaatgattactttctttacagtatgctaattaaaatatacaggtgattgaaaaaactattaataaaaatcagtaattttgttgagtgggattatgaatattaattatttaattaaaatttccttcaatagttaacaaagatttattgagtttctgagtcaagcattcttctaaaggctctgccttattagaatttttaaatgtatttgcaatgagtgtatattaaatgtaaaatgtatgattcaggtttaaaaaaaaatagcagtgagagtaattgaatgctgaggttaaatagaatgggtgaatcaaccataccataaaaaacttctaagtggatattatattccaggcactctttcctacttcagctgttgataaaatcaaatatttccttagagacccttgactaatgcaggaaataaatgaatacttgcctatatagacaaaataataacaacaaaagccagaaaccaagccataccaaaacgaaacaaaaacagaaaaactgtgatgacataacttatctttcaataggattttctcagaatgggaggcaatatatattttatgcttccatggtctgtagattccaacatttgtataattaacatatacaattttacaagggaaaaatactattcaacaaatacgtaaatacgttcaatgtaatcatgcagtacttcgtttaaattgaccttttttttttttttttttttttacaaatggtgcaataaaataatcatgtttaccttcttcacatgttcattgatgttggcgtgcacggttttatctatatgatgtgaccttttgagaccacatgacattcacaaactgaaactaaaccaactaaataaccagttatccaaagataagcaaaagtggacgtcagtttaattagtaaggggagattttaatcagtaatacactattataatagagaagagttcagcatgaactgaactgaactttgatttgtgtagaggtgactgggagttttaaagggagaatgagagaatgagtttgagtggtggctcattaaagtcagggaagtaacaaattacaaaaagtggaaaggtgggattgttccctgggaaacctctacgtttgctaaatggcacttaaggttaggctcctgccttctcactgtcttcgggttttgactggaacaaagggtaaattattttggcagctttgagttttctcagaaatgcaccttaagtggggctagagttatcctagagaggtggctttgacctgttagaagctatgttagtgttttttgttcaggtctgtgcaggccaaggttatggcctagctgagaagagggctcagaggagcctagctaaagtttggtcaaggggagcgtcttggtggagcctcactcctgttcaagtaaagaagacacattattcatccttctgaacagtgtaagtccatttgtcattcgattgccttttgtttactaaggactagctaaatcatcggttgagacttgctagtagagcatagttgctggatgatgcacgtgatcaggcatttaatgagaggcacctctatggaaacaaacataaaaacaaaaacttgttggagaagaatataaatcctatttgttgagtctagagggcaggcagttaagaagttttctagacattgaattctaagcatcttcagatggtagagtggtaatctgatggattttctggtttatggtttgaatgtggtgatggcataaacattaatttcacagtcatagttatttcctggaacagaacacggatgatgctggagttccagtggactttctgaatggctcttgtagcaggagctccaggcatgaaggttgcctatacgtgatttgttgtggtggtaagtcttttgaagtttatatcaagttcttgggcttcagtgtgcaaggctttttcaaatcctgggggagaaagacagctacaagacaaccttgtaggttgtcccagtagaatcagtaggttgtaggagtcccagtaaggatttgggcagtcagattttaattctcagtgatgtcaagtcaagagggaaggcaaaaaattataaacatcaatttggagagatgtagcccgatattgaaggaaaactaaacaattgagtatttagtaagagtggcaaaatgggtgagatggcagaattcagtttagtttacaggtaaatgataaaatcctcaagacaatgaacaaaattggaatctgataacccacagtggtgtgttttacataaaacacaacaaaaccggaattggatgagaagagtccctggatctagggtcatcagaatgtagctattaagagttggattctgaagccaaattcaaattaggtgccttgtactttgcgcactgaatgctctcaggcaaattatttaccttctttgtgcctcagtctattcatttacaaaaggaatcttaagagtatatatctcataggattgttttgaaaattaatgagtacgttacattcaactgtgtctgccacattgctgtgaagttattaccttcctaatatacttacaaacttcataattaagaaaaaataaaaattcataaaatgaacatatttgtaataacttattataaatattgtatagttcattaaatgtattacctttagacatattaaaaataacacacccctcatccccccccaaaaaattcctgtatgcctgttttaaagcagttctgcatgttaaagctgcatttatgatatctaagaagtgttttttctcctaaatagcaggttggtaataatgtatattgcaatcgtaataatgtaagttctggttacaatagtttatctgggtaacatgtagaagttaagtgaatgaggtaataaattaaccaataagattacctttctggtagggaggaaaaacacttctgggttgaattaatattttgtacacatatgaaaggaagaagaaaaataagaaataccatttgcaaagctgactttaataaattttaattgaatggataaacattttagttaaaggtagtaatcttaacttgagattacttgagataaaaatatatattttcttaagagacatgattgttagataacttagagatataataagtggaagggttttccattaaggtaactgatagtccttaggtaaattaaataatgggaggaacttgtgttaggaaatcaacatccgagttacagttaaattggtgggagtctttccagtgcctgaagatacagagattttcaatagaaataaggtttttctgagaaattaagtgaaataaaatgtgcaatagtgattgataagcactgtttattgaagaaacgatttatctttattcttgccctttgctttttaaaacttttattgcattttcttctatttttaatacactttgttattgaagcataacataaccatataccataaacacagatagctaccactcagatcaccacttggatcaagaattaggaacgaacatatttgattttaactgcagtctcttctctcttacgctgaaaatctatgtttctaatgacattagtataattgcttatatggtaattaccttactatatacatataatggttccaaaataacagttcttgaattatttttataaaacaaaattaacacaaagatttatagtgatttctgcatttattttattattatatgtttacagacattggctaatgcttctgatgatcaggcttctctcgattaactgaagatagccttactctgcagctgtgtatttcttattccatctggagcctatgccatcagacattatgtctgccatattttttcttctgtggaaaatcagttttctttctgaagtgcttatttttacctttggctgctgatgtagatctttcatttgttcttcatcttaggctgtgccctggctctaaaaagtgttctcactgtctctttgctttcatttttttcctttcctatccctacgcccttaaatcacaatatctgtcagagttccagaagaaagaataaatactcaaaggagtcatgactattataatagttgatagtgtttactttggcctagttgtttctagatttgtctcaagaagcaaacaaaccaaggattatatatataccatcttgaccacaaaccaagcctcagattcctctatacatatgtcttaagttaccaatacatgttaactgttataatatttctttgactatatgtatacaccatgtagatgtagactatgtatactttgcatcctgctgtttatcacatgcctggcacatattaggcactgaaatagttgcttaatacatcaaaataaaattgaatagggaaaatataatttcttaagttagcattcccctctctccacccaaaagtattaaataaaaaaacaagagtttacgatgactttaacattatgatagagatacaagaaaaacaaataagtatagtaattgaaatggtgcccagaacaccctctttgttgacactaaaagtaagttcatcagaccaaatctgtactgttcagctctggggaacataatttaaatgagacactgaaaaactggagcctgtctagaaagcaacttataattttagggacgtattagctgttttcaaatattcagctaatcagtggaaatgcaatgaagcatattcttattatgatgagaagaaaggaaagagagccctttgtccactaaatatttaaacaaacaaactttgtaacagtgagagatggccaaaaatataaaaagcttaatctggaagtagtgagttgtttttcactggggtgtgggcaggggcttcatgtctatttaaggaatgctgtgttcccatggaaaaccagcacaagacaaggatgccctctcttaccattcctatttaacatagtattagaagtcctgaccagggaaatcaggcaagagaaagaaataaagcgcctccaactaggaagagaggaagtcaaactatctctgtttgcagacaacatgatgctatatctagaaaaccccatggtctcagcccaaaagcttcttgtgctgataaacaacttcagcaaagtctcaggatacaaaaccaatgtgccaaaatcactagcattcctatacaccaacaacagagagaaatctgttccattgcatctgttgcatgcagtgcaacagggagaaatcagtaatgcaatcacattcacaactgccatagaaagaataaaatacctaggaatacagctaactagaggggtgaaagatctctacgtggagaactaccaaacactcctcaaagaaatcagagatgacagaaacaaatggaaaaacattccatgttcatggataggaagaatcaatatcattaaaatggccacactgctcaacgcaatttattagattcaatgctattcctattaaactaccattgagattcttcagagaactagaagaaactattttaaagttcatatggaaccaataaaagagcccaagtagccaaggcaatcctaagcaatttattagagtcaatgctattcctattaaactaccattgagattcttcagagaactagaagaaactatttcaaagttcacatggaaccaaaaaaaagagcccaagtagccaaggcaatactaagcaaaaagagaaaagctggatgcatcacattacctgacttcaaactatactacagggctacagtggccaaaacagcatgatactggtacaagaacagacacatggatcaatggaacaaaacagagaaccaagaaataagactgcacacctagcaaccatctgatcttcaacaaagctgacaaaaacaagcaatggggaaaggactacctattcaataagtggtgctgggataactggctagccacatgcagaagatagaaactggaccccttccttacaccatgtacaaagattaactcaagatagattaaagacttaaatataaaacctcaaactataaaaaccctggaagacaacccgggcaataccatttaggacataggaacagacaaaggtttcatgacaaagatgccaaaagcaattgcaacaaaagcaaaaattgaaaaatggcatctaattaaactaaatagtttctgcacagcaaaggaaactatcaacagagtgagcagacaaactacagaatggaagaaaatgtttgcaaactatgcatccgacaaaggtctaaaatccagcatttataaggaacttaaacaaatctatgagaaaaaaaaaccctactaaaaaagtgggcaaagggcatgaacagacacttctcaaaagaagacatacatgcggccaacaagcatatgaaaaaagctcaacatcactaatcattagagaaatgcaaatcaaaaccacaatgaaataccatctcacaccagtcaggacggctattaataaaaagtcaaaaaatagtagatgctagcacggttgtggggaaaaaggagcacgtatacattgttggtgggactgtacattagttcaaccattgtggaagacagtgtggcaattcctcaaagacctacagacagaaataccatcaacccagcaatatcattactgcatttatacccaaaggaatataaatcgttctattacaaaggcacatgcacacgtatgttcattgcagcactattcacaatagcaaagacgtggaatcaacctaaatgcccaccaatgatagactggataaagcaaatgtggtacatatacaccatggtatactgcgtagccataagaaagaatgagaccatgtactttgcaggaacatggatggagttggaggccattatccttagcaaactaatacagtaacagaaaatcaaatactgtgtcttctcacttgcaggtgggagctaaatgatgaaaacacatggacacttagaggggaataacatacattgggacctgttggagggtggagggtgggaggagggagaggattaaaaaaaaataactgatggttagtaggcttatatctggatgacaaaataatctgtacaacaaatccccatgacataagtttacctatataacacacatgcacatgtacccctgaacttaaaagttaaaaacaaagaaaagctgtggataggtttggtggacaaactaggaactggagaatatatgggaattttacaatagtctcactggagccttagtgggttttagtagtgtttcaagggccatgtgtagggtgagaagacagtggatgcccaccaccaccactaccaccatcagcattcctttagctgaatagctcactcttcatctgtttcatattgggcttctgggtcacattctatttaaagaaagagtttccactcgactctgaggtccttgaatccaaagtatctctcataggtccttggagcaatcgtattggaatttttaaaatgttgattgaatggcttgaggtgaaaggaacctgttgcacagaactagttctctgttatgagtccacaaaggtcttaaattcgataaacattgtttttactagtaagtgtcttagtatcttaaaattatagtaagcttgattcttttctatcatgttggcacagttcagttagcaaataataaaatgaaacaatgatgatatgtaggtagacatattaacatgcctttgtatggagcaaacaataagaagcagatgggacagtctgaggaacgcattaacaagagtttctgaagccaactgctgctgcacctgttaacctggaaggagattaatgcagtagaacagctactgtctttccatatttcttaccacaaaaagatgttttattacattcattgtaacctcttggtaacacattcagaatacaagcttcttcctagtttccgcacatgtctttctcatgatagcatactgtctttgaaaattccatctgctttgatgatttgggctattctatcaaggcaatataaaattgtttttcttaaactttattacaggtcattgagtttcatgatctatagtgaatatttctgtattgatttgttggtatttttattttctcttctcaagctccttgtaagtggggactagcaatgtattttttaattttccgaactatttaaaatctttgatgccaatgattcaacttaaattctggttatatacaccaatgataatattttgtatctagccgatatttaatatttatcatttttttaaagaatcattcactttcatcactatcatagagatgggacaaaaaatataaagactattttacgtatgtatgacttgcttggtaattatttgctgaatgaatgaaaaatacaaaaattgatagttttgctcttacccatcttgtatatctcttccagtgctcattttgcattatgtattagttcatctttgcctttattaagagtagaaaacgccatttcatcttttacatataaaaatgagtctggtctgatacagttactcacatcttcgcttaaatttcttttcttcttcttttttttttttttttttggtggagtcttgctctgtcacccaggctggagtgcagtgacgcgatctctgctcactacaacctccatctcctgggttcaagtgattctcctgcctcagcctcccgagtagctgggattacaggcatgcaccaagccacccaactattttttgtatttttagtagagacggggcttcaccatgttggccaggctggtcttgaactcctgacctcaagtgatctgcccgtcttggccttccaaaatgctgtgattacaggtgtgagccaccgcacccagcccagtgaaatttcaatttgaatttggaagctctactaaggtagtaatgtgaactttcaatattattagaaagctcatcaatctgaaatttaacataaggtaaagaaataaaaagcattaagaccttacttcatatgagagctagaatccatgacctgaaaaataaagtagataaattcacttataaaactataatttaaactcttaacttgtaaatttggggaaattagtggtgaatgggtttctaatatatggaacatgaagcagtaggaaatatgttatgagttgtgacagatattccacctcccacgagactgtgatttttagaatcgacgtgttataaaattgatctgaactttgtccctgatgctggaaaagtggcaacctgtgactgctctaaagtaagctaaaggagctgaacaaggctgggcacagtggctcaggcctgtaatcccagcactttgggaagcagaggcgggcggatcatgaggtcaggagttcaagaccagcctgaccaacgcggtgaaatcccatctgtactaaaaatacaaaaattagccgggtgcagtggtacatgcttgtaatcccagctactcggggagctgaggcgggagaatcgcttgaacccaggaggcagaggttgcagtgaaccgcgattgtgccactgcactccagcctgggcgacagagtgagactgagtctcaaaaaaaaaaaacaaacaaaaaaagaagctgaacaaatgctggcattcatacatggtttgagaaatagccctttttcatttaagggaaagacttactgagatccagattgagaaaacaccccatcaacaataaagtggctcaggaaaatgttttatactagcacatcttcaagtttctacttaaggctattctacatgaatatttaaaaagaggagatgtcaaatataaaagcacaagaggccccgagggcttagtatctttatttgcgttaaggtttctcataaataattctatttggggatataggctctggtatatatgtaataaatgtgagtctttttaatatcagagttacccttaggatagtaagtgtatttatttcaaagaaatataaaaataaaatgaataaaatatttcaggtacctcagatcattgcaaattagtcctcaagtctctttcagtttttcttggattatatgaataatgctttgggatagaggaaactcaccaaagtatatttctgaggactgggggtgggaaaggtttcagaaaggagaaacccatgggaagaatttttctactgactgtcaagtaattcatctcaacagaagaaaagctgattttcgatcagtttaaggtaatagaatatgtcagaattcctggggttttctttgttcaatagcccacttaacctgctgcagaacaccctaggaataacaaatgaatcataaggtagagggacattccagcacacttgttttcttcaaatattgatattttccccttaaaattatatgtctagaaaagcttttgctcggacagagtctgtagggccagaaatataaataactgtcaaatataaagctgaatcgcctccacaagattttaggaacttctgggctggggaaatgtggcctgaaggaaggctgctggtttggccactctctgtattccatcagaaaaaatggtggggtataatcagaagttgaaatgctcacagtagttttaccccatggcttgtcagctgaatattgcgacaatataggaattcttcatcgcagaaggaatgagcctccctggactgatgattttctcagtttatggtgtgtgtgacgtttttgtaaagtggcaaatagttgggggcatgagctagaaggtaactttaggaggttcaaccaaccaagtaccacctgcgaattggacaaaattcaatggacaaaagaaaacttaattgtcagcttactcccgccttttactcccgggacctagcttatagcacatggttcataaaagactctataaatgattactgaatgaatgaataagtgaaagtgcacaaatgaatgtatctctgagattttaagacacttttgtgttcatgcgtcttgcctacctgtctccggtccttctgaattcataaaaagaagaaagttcattttttctggaatgactgatcttaggaaataggaataagtaattctgatgggtagaaagtgcagtgtatgaagattcagaagggtaaggccaattaatttaaacactctgagtctatgttctaacctgtaaagaaggctgataatatttgccttctctgctatggtgttcccgaattgtgctttccaagaaatataccatcacacaatatatggccgtggtgaatacagtctccaatgtccttctccccctgcaatgtgccaacagagtgatctccctaagcatacagggtggtgcagtgtaaaggcacactggtttctgtttgaattccagctttgctacttactacctccataatgtgtagcaagatacttcatcactcacctgtaaaatgatgataaaatgatacttatttctatgagaattaaatagctgatacaagtaaagagcttaaaacagtatttggcctgttttaagtgctcaatagatcctagatgttgtcattgctgttactactgctgctgctgctactactactactactacatatttgtttttggaccctacttaatcccataggttgccacaactactgtctacataatgaaatctaacccccaagtataggatactggtttctaaaaatctagttcatggctatagttctagcttcattcaccaccgttctactagcaataccagtccatctgtatttcctccaatagaccactctatttttttttttttttttgcctctgcacctttacactggatgtttattttgcctttagtcacatatccacaaagagatgttctgggctccatatgatggagttgcatacagtgctgagcttttctttcagggacatattcagaaaggatgagtttttgattgttgtcaaatttgctgttatgctgattttttttagaactgtttgggcgactaatacaaattcatccaaagcttgttaagaatacattgtaatcatcagtatttttaaaaagcgattcttcattctttaccattgtgtttcccatcccaaggatttcttcagattaaaatattaaatgggacaggcaacactttgaatgtaaaggagaaatgggaaacactaacacaatggtggcatgataggggatgaaacacagaaagttggaaccaaaggggagcaccatcgttcatatttatgtgtaaggaaaagaacagaatgtccttgggtagtttactatttcttaataattctcctcacttttaggcaagcttgccagtttttttcagtggggatcacaaatgcctatctgtctgtctgtctgtctgtctgtctatctatctatctatctatctatctatctatctatctatctatctatctacctacctacctacctatctaatctatctatcatctaatatattatgtgtgcgtgtgtgtgtgtgtgtgtgtgtgtgtgtgtgtgtgtgtgtatgtaacgatttaattgaagcaatggtaagacattacaacttcaaaaatactgttttacttcacatacactttacctctaggtttcatagcaagacaatagatgggtgtagttttagtattatttacttttatttgttaattcaaggcactatagaaatacttaatctgtttaaaccccaaacatctctttaaaatattttatgtgacgagcaaacagaacatcatgatctaataaaaatgaaaatgtttttgatgttaaatgttgaggtaaaacttttgttcagttattataaaataatgacattttgagaacctcttatttttaattttatcgtctctaaaattgagacaatcacatcttggtatcgataatttttgatgcatgatgtaatatttaaaggactttaaaaatgtaaaatgctgcataaatattattgctctgcttaacagtgtttcaaatacatttttggaaaaatagcaaagtaagagataacatgtatctaaagttctcatcccttatcaactaaatattatgaaaaccttagcttctcttgcttctccagaatgacagattagcttcagcctaccttagactaggcatatggaattggcaaacgctctccttagcaactgcaaagttcaccgcagatgcatttaacagaaatagcacagatacaattaagcaggtagaaagaaagaatgagcatgtaaaacacctacaatattccagatttcctgctcacttaattggatgattcagatacctctctttcataatgtccaggtgaaagaaatgccggttcctcttatttctctacatcaaactaaagctccacttaccagagcaaacacaagtacaatctgttatgttttggactgtctaatccattctctgtagtttcacaagaatctggtgagcttacatggcatccagagaacagggtgatgagtaaagcccttaactctacattgtctaaagaacctgatttattcaaagaggaggcagctctctcacttcttattaacagagggtagagagtttctttcccaaggccaagaggggttttagctattaatacactttctctccctccgtccctggtgtgtgtgtgtgtgtgtgtgtgtgtgtgtgtgtgtctgtttctctcactgtcaattttgagtggggtttcaaggtttaaataaggtgacaagtctagtagaaaaatctctgaaagagctatttgtagaacattaactgactagttgtgtgactttgtacaaccagcttaaggattcagttttataacagataagtttagggaaataaattgcactgcacattgccttcggtctgttgtacctcaaatagcttaggaatctgttttctcctaaaacatcttcctggaagctgggtttccgctccaccccacctcccatgtgtttatgcattcctctgctcctccccttaactgagaatcctcattagaggcctgggtaaaatgtttcattgttagagttataatatatcaataatttacattaccttaattttgtaatttcccagggcattttgaaatgttatgataacatgaaaaatgtatgactttcctcaatgaaaagttaattaacaattgcttttattcttcaatgaacagctttatggctaaattattactagttttgtttttaattagatgactaaataatgcaaaattagaccatctttgtcctgacactgaattagaccattctttggcaactcgtgtacaaactattttcatttttaaaaaaatgtatgattctgagaacaagtaaatgcaattagaattgtctttcagagggaaagtggccccaaatgatgtcaagaagccagttttatgataaagatgtctatttttatgaaataaaagtaaggagaaaaaaagaattaatacaacttcactttgagattttatttttttaattcttgagttaggctgaaggccagatttgtaattgctcgtgtatgtgctttctaaaacttgcttaaggaaaactggatggattttctaaaaggcaattaaagatttgcagttgaaaaatcatcctccctcataagtattggtgtatacagtggtttccctgcatggaggatatgctggacaatatattgagaactgcagctccaggcaaaattaaactagtgttttttagagatactaggattagcttgtttactaatttgttaaagcagctgcgtttacgaaatacataagccttaagttttaatcttagaaacaccctttcccaaatattctaacaagctcaatggtcctctgcctttgctgatatttagaacatcacgagagtctttaaaacttacagatgcctaggtcccacctgggaagtttctaatttaattggtttaggtggcaacctagtcactgggctgtttaaaagctccccaggtgactataatgcacaggaaaggttgcaagccattgaacttgtaaacaatatagcagctcccatacaaaagcccgtaaattcaaagaaaatccagccatatgaacaagaaaaaaaatgtcaacgaagcagggacttcataaacatatgtttgcaacaacacatcattgaatatgattaatttgatatatctgttttgttataaaatgtctagaaaaaaatgtaatgtaacaaaaccagcaagcaatttaaaacaaataggaaaagatgattagtagatcatatgatataatttttagataatacaggaatcggacattgaatttacgttagatttttatagacagatatacagaaaaacactcagagtagacaacaggatgttagcagtggtgctgcttaatgaaaaaatgagttatctgtacttttcttaatagttattgttgtatctttttatggtaaacatacattgtttttgtaacaggagagaaaaagtagtgttctttccttgaaccaaaaaaaaagtaggccatttaaaaattaatgaataaggaaaatacacatgaaaacttctggaataagaacaaagctgtaatcaaagaaaattaatagccttaatttttttatatttgagattaaagggaaaataagagaactaaacatttgattctgtaagaaacctttaaaaagcagtacaagaaataacttcaaaaatactatattgagaaatgctttcaaacaactaagtatgaattatctgtttacaaaattccaaaccatgaaaatagtatttaaacctctatgttcatgttctaaagcccttataatcttgattatgagacttcaaaaaaatagcatacacattgaaaactatcaaccaatctcaggaatacagacgttcaaatcttataaaacatagcagatttagccaataagagaagaagttatcatgccaaattggatttatttcaggaaaacatatatgcctactataagagaatctatttacatccttcattgtaggtaaagatcagaaggaaaaaatatacaatactttttagttatgaaaaagtattgataaatgaaaagaatctgtccctaatttaggagtagaaacaaaacttttagcaatgtaagaatagatgatagtttataagcatgaaaaatattgtctatctcaaaacaagagccaactctgtgatcaatgttgaaatattgaaggtatcctcattaaaattagaaatataactagaatgactaccaaaactgctctttttaaatgctattttgcatattctagtcagtgaaagaagccaagtaaaagaaacaggaagtataagtattggggaaaaaagtcaaattattcatattaatagatgatattgtcaacttggtactaagtaaatcaacaatgacaactattataactaatgggaaaaattagtcccaaagctcattaagaaaagaaaaaacctagaaataattaaatattaattaaatgtaatttttctaaatgctaatttctcttttaacaacctattgaaaatcaaagctatcattttccacagaagttcaaaatgtgaaattactgtgaatttatttagcatgaaatttggtgatatacaagcctttactggaaaaataacagaatatttgcatccatggacagatataattttatatttcttggtgggaatattaatattttagacatataatttactacaaattaagctaaaatctgatagaaacacataaaatttaaattggggtggcaggaagacattggatgtgacaagaattactctaaagtttatctggcagcaatatagatgaggattaatagaaaatgttgaaaaccttaaatgaaaggtcatttgcccatgtagctattagagtgtttaataaaacttctactggctgggtgcggtgtctcacgcctgtaatcccagcactttgcgaggccgaggcgggtggatcacctgaggtcaggagttcgagaccagcctaaccaacatcgtgaaacccagcctctacttaaaaatacaaaaattagccgggcatgatggcaggcgcctgtaatcccagctactcgggaggctgcggcaggagaatcgcttgatccagggaggcagaggttgcagtgagctgagatttcgccactgcactccagcctgggcaacagagcaagactctgtataaaaaaaaaaaaaaaatctactaaaagtctatacaaacagattagtgaaacaaaagagaaaatcccaaaatatgctcaagtgtatataataaaaatggaatttcaaatcagtggatagagatggactatgaaagaaatggttttgataatcatgttaaaaggcaaaaccctgctttacacaatgcagtgaattaaatttcaccttgaacaaatattcaatcataattaagcttaagaagcccaaagaacaggaagaacgataggtgaatatttctacaatgaggcgatggtagagaactatgtagaaatgattttaaaaacccaaaatttaaaatggaaaacacatagataatttttaaaatctgtacattaaaaaccagtaaactgaaattgaatcttacaaatcaattcagaaaaataaatgcattgcctaattttaagcatacaggaagaaagtgttagacctggaggtcattattttaagtgaaatgaaccagacacagaaagtcaaatattgcatgttcacccataattgtgtgctaaaaaatgtgtacacatgtacacagagagtggaatgatagacaatggaaacttagtagggtgagggggttggagtggagtggataatgagaaattaatgtgtatgatatatttgggtgagggacgctctaaaagccctaacttgaccactacacaatctatgcatgtaacaaaattacacatgtaccccatatatttggacaaaaagaaaataaaacacatccaaaggtatatgaaaaaatgttcgatctcatttgtaaccaaataatgaaaataaaaataacttttccttgtatactttgtatgcttctgacagaagactgaatcaatttatttcatgagagcagtttgcaataccaatcaagagaaagcgtgcttacacttgactaagcaattgcatttccagggaaattatcgaagaaatgcttacatctatgtgcaaagactgagttgtacctatatttattgtttaattgttattacagtgaaaaatggaaacaacaccagtattcatcagtaggaggctactaaaaaatgatatatctctaaagaagggaaatttaaaataaaattttacaggtgattgcattgatattaaaggtaatccaaatacatacatgaaaaaataaagcagactgtaatacacagtatgtatacatataatgctgtattatgatcccgcttatatatgcatatatattaaaatataaatttttaacctctgggaaatgcattcctacctaattttaagtctctcattttttcttattggaattttaaaaagtgtacaatgcttattaatgaatataaatttgtttgaatcaatgttttcaatttttaatcaaattatctgtacatgattcaagtaatttttacttcataagttcttttatttaaatatgctgcattcctctctcatttctcactcctcagaggcagatatttgagtcattctctttttctaatgcgtgacaaatctgtaataacatgtttatatctctaattcttgattttctcattttttcatggtctacagtctctcttatgagagatgaaaaattatctcatttatatctaccccatgtatttgttctattaactaatttttcttttacatgaagaccttaaatgttaatttttttcttcaaaacagtgtcaaaagtatgtcttaacccttcacatgataaaatggggattttagtggtcctccatgtttcttcacttctcctactgaatttcttctcccaaattctgtaaagtctacttttaattttatgttgagttgcattccttctgtgttctctaactatgattaggtctcgtgttttgtcaaagatttattctaaaaattgaaaacatataaacagtatgtacactattattatagcaccataaatatatttcattgcagagtctattaccgtgttgggcttatatttcctttcctatgatttccatggcaatttacctctgctactttacagaaaatttcaagattcaagttaaaatggattctctttttttttctttttttgttttttgagacagagtctcactctgtcacccaggctggagtgcagtggtgccatctcggctcactgcagcctctgcctcctggattgaagcgattcttctgcctcagcctcccaactagctgggattataggcacacaccgccacacctggctaatttttgtatttttagtagagatggggtttcaccatgttggccaggctggtctcaaactcctgacctcaggtgatccacccgcctcggcctcccaaattgctgggattacaggcatgagccactgctccagccaaaatggattatcttttcttacactcagtaatctctcaaattcaaataacgacataggaaattcctaagtctattgagtctttatctaccaaatctccctctctttcactttctctgtctctcttatgtacacgtagacacgcacacactcccttctcaaaaggtaagagaataggatggtttgtaaaggggaaacgtctctggaaacacccacactttaataatgtcttaactaatcacattgcttgggtgtttttgttattttgtagtttgcggttttgtttgttttattttctgataacctgcagagtaggaaagaagagagtccagaaacttgttgtaaagctggacttcaagttggaagaaatattggaaggaccttttaaaaagagagttgtatgatatcgaagcagcctatttccctgaccccttcccgggactcgtgacagggttgcctcatttacctagaccagttttcaactccttatgggagggagcatgcaagtgaattccaggggtttggggtacgaatgatcctgtcacccaggtactgagtatagtacccaatagtcagtttttcaacccttatccccctccctccttccccttctagtaatccctagtgtctatcgttttcacctttatgtccatgagtacccaatatatagctcccacttacaagtgagaacatgtggtatttggcgttccgttgctgcatgaattcgcctaggataatggcctccatcacagctgcatctgtgttgctacgaaggacatgatttcattctgttttatggctgcatagtattccatggggtatatttagattttctttatccagtccaccaatgatgtgtatctaggttaattccatgtctttgctattgtgaatagtgctgtgatgaacacgtgaatgcatgtgtctttatgttaaaacaattttatttattttggatatatattcagtaatgggattgctggattgaatggtagttctgtcttaaattctttgggaaatctccaaactgccttccacagtggctgaactaatttacattcccaccaacagtgtataagcattcccttttctctgcggcttcaccagcatttgttgttttttgagtttttaataatggcctttctgactggtgtgcgatggtatctcattgtggttttgatttgcatttctctgacaattaatgttattcagcattttttcatatgcttgtaggctacttgtatgtcttcttttgagaggtgtctgttcatgccctttgcctgttttttgatggcgttgtattttgcttgttcagttttttaagttccttgtaaattctagatattgaacctttgtgtgatatgtagtttgtaatgattttctcctgttccgtaggttgtctgttactctgttgatagtttcttttgctgtgcagaagctttttagtttaattaggtctcgcttgtcaattttttggttttgctccaattgcttttgaggatttagtcataaatgctttcctaaccccaatgtccagaatgatgtttcttaggttttcttctacaattcttctagtttgaggtcttacatttaaatctttaatcatcttgggttaatttttatacatgtcgaaaattagggatccagtttcattcttccacatatggctagccagtccatttattgaacagggagtcctttcccattgcttatttttgtcaactttgttgaaaatcatatggctgcaggtgtgtggctttatttctgggttctctactttgttccattggtttatgtgtctgtttttgtgccagtaccatgctgtttttgtttttgtttttgctcttatttaaatgttataaaaattgcctatatttaagatgtataatgggatgttttgatgtgcatatacgcagtgaactgattactacagttaagctaattaacatatccatctcttcacatagttattttgtgtctgtggtaagaaaacttacaatttactctcagcaaatttcaagtatacaatacagtattactgactatagtccctatgctgtgcattagatctccagaacttattcattgtatgtaactgaaacgttataccatgctgattcggttgctgtagccttatagtatagtttgaagttgggtaatgtgctgcctctggctttgttctttttccttaggattacttttgggctcctttttggttctatatgaattttagtatagcttttttccagttctgtgaaaaatgatgttagtggtttgataggaataacatttaattcgtagattgctttgggtagtatggccattttaatgatattgattcttctaatccatgagtatggaaagtttttctatttgtttgtgtcatctgtgatttattttagtagtgttctgtaagtcttctcatagagatcattcacctcttttattttttatggctattataaatgggattgcatacttgatttggtgcttagcttgaaaattactggtatgtagaaatgttactgatttttgtatattgattttgtttcctgaaactttactgaagtcagtgctatttttagatggatatatgagaatatttaacttatatggagagtcatagaaattacacaatttgtatttcatacatcatccacacacatgctttctttacttaccagaatagtggaaatgctgcataaaatgaacttaatggtttttatttcctttcttcataaatgtacagtttatcaagaagatgccctttggcttactgacgtgtaaggagggactaaaaggaaaggaaaaagaataggtagctctaacttttcctttctgtctacatcatcattttttattgcaaggtggttggccaatataaggaaggaacaccactaagaaaagatattatgtggttttttggtcattagtgtttcttagaatgtcactcacttcttcctgcatatatatatctcaaatatatatatacacgtatatacacatatatatacatatatatctcaaatatatatacatatatatctcaaatatatatatatacacatatatatttagaagattatttggtgaatacactattagaacaaaaagaaagaagtattagcgaagtgacagggtatttcccaactcagatatatgatacctgctaatggactgttcgtgattataaatgtagtatatgctcattgtagacattatgaaaaacgtaaaatcccctataattagacctctatttgtgctaggcacatgatgacttttcttgctctgcaacaactattttttttctcttaaagtttataatgttgtcagtattgtcggatatcctcagggattccatcatcttttcttaattgtggttaattacttaaccaattattacaaattattttcctataatttattgctcttagtatcaaacaattaaacaccctaggaaatgtcttattacttgatctatgaactggtgagaatctatattctacataggggcttgttttctggttttaaatctaatacagtcgtttggcaaataaagacaaaaaataaatgttgtctacctacttttcaattatccaagtagtttaaaataaaaacatccttactgattttttaaactcttatataattgcctaattctacagtaactggggttggtagtaactaaaacctgttgtattcctagtgatgcccaatgagccttgggaaatgaataggtgggtatagtccagttgctagaaaatacttgcttgttactgacttatctgagaggaaataaacactttcatttatcagggacagagtataaagtgttcctcactgaagcatttctaaaagctctacagtcctttgaatactgataaggactctgaaatgcaagggaaaatatgcaagtaatctggactatcacaggttattttatgaactgctcatatttttactcctttgataagtattatttcccccaaccccaaacccgataaattcgataacccttttcatatataatattatcagcaaggcatcttagagtttcctttaaaaaatgtaaattaccaagagaaccagaatgattttggggctcataatggtagatcttaaagagagtggaaagatcagtagttttcgcattttgctacacattggtggagtgtttacaaacagtgatatctgcgttctatttccacagagtctgacttaagtggtctgtaatccgagcatctcagtttgaaaagtttcctagataattttaatgtgtatccaacgttgaaagccagagtaaaatgaaggaagttctggggcctcagataagcaacttcactacttttttcaggttctttgaataattgacatcatccccaaattcaaatcgttgatagtcatgatgagtacctgttttactccagaaatctatataatattggttacctcagtgcttgctcttaacttccataatcaaaggaggaagagagactcatcgtgttcagatacaggttgtgtaacgtgtgtctgtaaaatactaatgtgattgacttcatccatccattcacctatccatccatgcatccatccatgtatacctcgtgtacctccattcgtctactcatccaatgtctctgtctaggctccaggactgctgccttaaggttgtttaccaactcagtaggtagtatgttatcctcaggctttggaaacaggggggtttagttaaagagcaaaccaactcaacatactagattaacttgaaagggaaaagttatgcttagtgcataaattctttccctcttgtcctttcaaatccatttttcattctttaccactgtgctttgtgtcctggggactgccctttaggaatggcatcagagttcctttgccctacagtttccagttgagacaggctgcagcaggaggagtacagtggataagaaaagggtggagtatttattttcatgtggccccatgggatttccacaggttagctctgaacagctaacattagaccagagcttctgctggacagttctctcttgcatttctattgggtctggctctctagttcaggaaacgtccttcctcttaacccttgaggtctacagttaactctccgtcatcccttcttgaatttcctaacactgagcatatctctgttgataacccctttagcaaactggcctcacataccccgagattgagaaatcaatcctccagtttctaccgggactctgattgagttaatgtgggataatttgcttacactaccctcttataaagtgactatgtacattagcatattaactcctttgaggattttcatttacttttgttattaaagcattacacgttttttgataatgtgtaggagactcaatcatagccagaagtgtctcagacgcaagcacctgtaatgattcccttatatacagttttatcccaccagaaattgggactaggcacaagtgttctaggtaacatttcaggatcctactgtcataaagattattatggcacaaaaactatttggctagaagtatccccagactcctctgtgccacattatcttcctttatccagttatctgaggatgtgcttgcagtggcagactagcttttggggaaattttatttcaagaaaaaaagcagggaggaagaaaagggtaagaaatgaggaagggaagaggcccatgggctaggagtgggctgtcctgtttctgggaaactttgtgaaggtttcaggagtagtagtaactcatggtgaatgaaaatgagagggaattgttggcttttaaagtaataggatatgcccctttatgatgggattaagagatacaagtaagctgggcgcggtggctcacgcctgtaaatcccaacactttgggaggccgaggcaggcagatcacctgaggtcaggagttcgagaccagcctgaccaaagtggaaaaagcccatctctactaaaaatacaaaattagccaggcgtggtggtgcatgcctgtaaccccagctactccggagtctgaggcaggagaatctcttgaacccaggaggcggaggttgtggtgagctgagatggcgccattgcactccagcctgggcaacaagagcaaaactccgtctccagaaaaaaaaaaaagagatacaagtaaagttatgaaatcacctgtggtttctagacagttttttttgtgtgtgtgaaatattaagaacagaatacatgtgctaaaacattttaaaagcttaataaggtcttttaaatcttgcctcttccttttgctcgtctaatattacctcctatgtccacccccacggattatttacatttaatgctttctagtgaaatcattaaaatgagatttatggattattcataataggcaggatgaaaaaggaaggtgaggcgacagtgatccttccttagctgttaatggataaggagtttcacagcaagaggaaaaaggcataacattagtattaccggttgtctaagggggagagatagaattgtttttttttccttgcattttctgtactctactcttatttccaaatattctttaatgtttgtgtgactttgtgacttctatattcagcgcaaaaaggattaaagaattaatttaggaaatcaatttacactgagtgtctccagtgccagagagggagggaaggacattcgtagctacagtgttcataatagcaaataattgtattatggtcataccatggaatattatatagcagtataaataattaactatgatcacatgtaagaatatgagaaaatcataaaaacataatgtagaggtccacaaacattttcttaaagggccagatagtacatatttcaggcttctaggtcatattgcaaatacctaactatgttgttgtggcatcaaagcagccatagttattatatgagtgaataggtgtgagtgagtctaataaaacttcatttttaaaaactgtcagggaggccgggcgcggtggctcacgcctgtaatcccagcactttgggaggccgagatgggcggatcatgaggtcagcagatcgagaccatcctggctaacacggtgaaaccccgtctctactaaaaatacaagaaattagcggggcgtggtggcgggcgcctgtagtcccagctactcgggaggctgaggcaggagaatggcgtgaacccgggaggcggagcttgcagtgagccgagatcgcgccactgcgctccagcctggggaagtgcactcactccagagccggggagcccatgggcggtagtgtgctgacccttgtattagacaacactccagaaagctcaagcataggaacacctaatgaaaatattgttttggcatacatgcatgtgtgataaatcgaaaaaaccaacacaaaacaaatgagcaaacaaaagaaatcaaaggcaatgatatgacaatccccagattctggatggtagttaatcctgggtaaatggagggaggggtacaaaagagtgaagaactagtgtaggagcacataggttcaggtgtgagttgttgctaatatttcagttattgggatggacatatgtttgttttattattgagctttgtaatttacatatccattacatatattcttttatgcatcaaatatcacattacacaaagggaaatcataaaaattggggaaaaattggaggcaagcatagatcttggggcccagtgtagcatgcttttttctatttttaaatttaaaattgtttttagagatgcggtatttctctgtcacccaggcttgaacccctaggttcaagcaatcctcctgaatagctgggattacaggtgggtgccacttcacctggctaactaaaacaaaattcttttaaagatatggtctctctttgttgcccaggctgatctctaactcctggcctcaggtaaccctcccacctcagcctcccagggggattataggcacaagtcagtgtgcctcacttccttcaacattcttaaatacatcttggaagcacagtgtttattaccttgtttctaaaagagatgcatctattgtaatcatatttataatgttcttatatatggttttcattagttttactgaaactctcaacctattgttttttgatgatgactaccaatattcattgattcactgataatctttgtaatgtccttaactcttagggattagatgacattaaatctttatcaagaagtggattttgttacttaagtattttagtagcaacaaaattggtcacaacgacattccactgaagcagaatagtcagaaagcaatccaagccgcagaaataaattaggttgagcaagactacacctaatggcattgagataaagaccctactcctgactcactgccccgtgttctagtggtgtgcctgctctgcaattctccttaagttgatgtgcatctatctctttaggaccagggggtatttagtctgtaatggcttttccggcaacgtgtctcatttcagctgcttcagttgtcgagataacactctcgtcactgcctctctgatggtttcccattcaacagcagtcatttcatcttgggacacttttcctcacagtcaacagtttttcctttgtgtaattaagtctcatttttttctggatagatccatttgtgccagaactcttctgctgccttgaagcctgcaccattcagttatttttagtgttatctctttcctttcattagcacagagctaaattgtgcatattttgttctttcagctttatacagattaagatcttctagctccttagtcattcattttagctgttgcattgaatttcctacagttcatttaaatcacccagttcagtttaatatgcccagaataaataaagcatcattttttttcacatctaatcacctaccccgaccaatggcaagtgtaaggattataaacctttgtgactttgcctgtttactcccttagtaggtgagctctgagccaaaatataaattcattaaagtttttcttaatatctctagtctctacttctggctcccttccctcagggtattatcccctttacaaatatttttttgtgtctttaggtttccatttgttttttaaaaatacattcttatcaaaacgggaaaatattttcccatttctttcataaaccatgttttctcaatagttatctctaatcaaatacaagaaacagggaaataggtagtgccttacaaaggaattttagccatatacgtttggataaggtgaattttccatatcctggagatggttttgagtactcaggaggctacatctgaaaaaaaatatatagttattctctatctgggagtcaacttaattcttttgatggaaaaatagaggctgtgaatccccagctccagctggcagagatcactttgctcagaagttttgcacgtaaaaagaaacttcttttctgggatcactgatttatttcagctgtaccctgaaactggtagtcagatacaccctgtaaccagcagatctgatattctccagccttttcgggcttgtacatcaatcgtttaaactacactataatggggatcatttgccaaagctcattgccattctcttctagtcataccaatttataattacttttctctcaatatgtacccacgactctcctttcttcacccttatgatatttattcaaatattaaatgttgccctttttttctacctttattccaaatgccttagaggtctggcgtaaactatatggctataacctattgcatttttaccccatagatggaaaatgtattggtgaattgtttataaggttggaagttcccctgaaaataaaatccacccaccccactaggggagtacggaaactatatataatatgacacacatcgctattacttttattacatatgcttattatttattgttcaaattttcaaatatggtcctgcacacaggcaattttcacaaaagagcagtatcagtgttaatcagtttgaaacaggaaaggatttgtgaccccaccttacaaaatacaattccttatggttacaaaatctcattcaaatggattctattgtagccatatcaataaggaaactgatctatcagccaaaatcggaaatagccctgataaagtagactgagcttacattcatgcacagatgtttgctcattatttttacttgataaggacagatacgtttgtgtttagcataatgcgtgtgtgtatatttgaatagattttctagaccctcattttagttctagtaacaattgtctggttctgaatagggactttccactttacagaagcaggcaaaatttaatttgtcatagctaccactgaacccatttcctttatatactcaatctgctttgacacagtagatattggagtttcaaaccttaaaatgaaatacagctttatgatgaaatataagttgatatgaatactttcaatatacctatattctatgttacactcagttagctggcatttggtcttcactcatggacattttaaaaactcatacattctttagtgtttgataatgtgacaaatcaaccccctataaaattaactttaaatcaattgatacgttagcatgtgagtatatgtgtgtgactatgaatacatacttatataagcacacttatatgcttatacgtttgtttgaatctctcactgaccttagccataaaaacacttttattctgttgatttatacctcagcctacatgtgaacaaaagattcagcaaatcagaataacacagttactctattttctaatttatttgtaataaatatgcattacctgcataacgtttacatcaatatgggcatacattacttatgcaatgtaatgatctaaataacgcaactatcgacagtaaccacgcactctccccctagcaattacagaatacagtttctctgttgcacaacatgcctgactatcgtaaatttagggttatctccttattaggattccatttacactcttaatgaatcatatttattttatagcagcttattagtaaagttgactgccaagatataggcaatacatacaatttcctcaaaaactggggctttcactgttaatttaacaaacctatatgaatccatataatatatgaatcatatgaatatatataatatgtaataagataaaatgcataatttaacatatatgaaatatatatagtattaattgttaatatgtattaatatagtataaaataatatatataataaatgtataatatataatatatgaatcatataatagaaaaatatatgcatagacttgagttaggtgtaaagaatggaaaaattaaaaaatagtgcacttgatgagttcacaacctagtatagtgtgtcatagagaatgtagcattttgtgtatgcaatagtaaatatatataatgcaaaagaaatgaatggttttgcttagggtaggaggaatggggtaatatttgagataaatctcaaagcatgtaaagatttatcaaatgaagaattggggttatggaggagtaggggttgcattccaggagggagggaccaacatgtacaaaagcttaaaggaatgtaatttcatagtatctgggaaggacaatgggtagctatatgtttctgaaatcttgaatgcttgggtgaaataccaaaaatagggctagaaaagcaggttatgattagattgtgaaggcatttaaaagcgtcttgattagttgggaaataatttctacaacgttttagttgtataaataacaaaagcttcttttaatccagatacttagtggaagttcctctttctctaagtagaatactagacctaataataataataataataccgtatcatatatttttattacttttttggttttctgactactttcaagtacagagatggtccccgacatacagtagttcaacttaacaatttttcgactttaggatggtgcgaaagtgatactcatgctgtggaaaccatactttgaggacctatacaactattctggttttgactttcagtatagtatttaataaattacatgaaatattcaacattttattataaaataggctttgtgttttatgatttttttcccaactgtaggctaacgtaagtgttctaagcatgtttaagataggctaggctaacctatgatgtacagtctgttaggtgtatcaaatgcattttcaagtttcaaaatttccaaactatgatgggtatatcagcatgtaacttcattgtaagttgaaatgcccatcaaagatagactggataaagaaaatgtggcacatatacaccatggaatactgtgcagccataaaaaattatgagtttatgtcctttgcagggacatggatgaagctggaaaccatcattctcagcaaactaaaacaggaacagaaaaccaaataccacatgttctgtcttataagtgggagttgaacaacaagaacacatggacacagggaagggaacatcacacacctgggcctgtcagggggtggggggcaaagggagggatagcattaggagaaatacctaatgtagatgacgggttgatgggtgcagcagtccaccatagcacgtgcatacctatgtaacaaacctgcacgttctgcacatgtatcccagaacttaaaatataataataatataaaagaaaagtatctgtgcttgatgggttttgatatcctcagtaactatggccaattagttgaacatggcacagtattatccatttgcagtagaggaaacaaaggagaaaccagaggaacagtgagagagagagagagagagaaagctgctggtcatgtcctctttccagcatgtcaccctccatattcttcttcaaatcaaaaaacgtagaacggaagggagcttagtagcattcagctctgctacactgcacaccagctatacacacaggcaatcaatatggtttggacacagctgatataatttggtggagctctaattgaatttttccccttcttaatataattacacctacagaacgtctccaattaagtgtccccccatcagtctcaaaattaaatataccaaatggaactcattatctactcccacataaaccagctcttcatgactctttcccctttctattaagcaccactgcttccaggctcctatatctgaaatccctgaagtcgcttatttttgtattcctttctccatcccgaaatccattcagtcactgaatgctattgactaatgtttgaaattatatctatgcataccttcctttacgttatgggtaaatgtttttggaatgtgtttaaacagaacaaggaattggtgaacaaaagaataaagccatgcataaacaaatgtttattcaccgttttcattatatttgtttgtagtactgcaacctaaagtttgtaatgtctgagaatatctgattgtaagcaattaccccaaccccatgtaagttaacagtgttataactggtacgtctccttataggtgaatttgttcaaagttgcttaattatattttaaaaatctcttattttagaaagaactctcaattgctttactctgaataagataatactgtttagaagacaaatcattgcaagttttacatctgtaagtaggttacctgatgaaacggattgaaaaactgaaggcaaatattgaatgttagattattcccaggtatctgacttcatcttcttacttgctaggtgtcattgttaatgataatttaaaaaatcacacatacctacgtatccacatatacaaaacagtaagcagtcatgctattgaattcacaaatatacaccaaaagacaaggggaaaaatataaacaacagctttcttactagcaagcagagtgtggcgtgaggtcaaatttttatgacgaagagcatacatattcacaaagtaatttatctcaacttatgtagctggaaatggagttgatgggttctgaaaaaagcttctagatgacattaaaaaaaggggttcttatgacaaagaaaaaaattacctcaaagtagctttcaaagagatcgaataaagtcatttcatgaaatgcgagactaaaaaacatgccagcatttctaatatttctaatgttttatatgatataaatatgaaatataaaaatatttaatatttttatcatagaaaattaatggcatcaatttcttatcaaaatcatgcatacaattgattatatatatttgctaaagtcctaaaattttgtgtatacatgttggcctaaaatatttttgagggctcacaggcatattttcttttgggaaaatggaaactgcctaatacatgagatgatttatatacatgctgcattttacaagcggttagggaaacacatgtctattttttttctaaatcaaataatccgtgtgtgcaccatgctaccttgaatatcagattatcagatttaccatccctattagggatataaatgttccagaagaacataagagcaaatttttagaaagattaatacagaatctaaagattgaagggataagatgatttacattaaatctgtttccaggatatcctagttgggaaatcaacctaaatacccgaaaacttaaataatccaagacagtatgcatttgcttaacagactttttctccatcatttgtctgtgtttagtaagataaaagaaagacttgcggccgggcgtccgaggcagcgggtcacctgaggccgggagttcaagaccagcctgaccaacatggagaaacatcatctccactaaaaggcggaggttgtggtgagctgagatctggccatcatactccagcctgggcaacaagagtgaaattccatcaaaaaaaaaaaaaaaaaaaaaaaagaaagaaagaaggaaacttgctacccctcagtaaacaagttatatttccttcataactttcttcctataaggcaataaacaaatatttattaagaacctatcatgtgccaagtaaataagtactctgtcaaaacaagttagattcagagtgggctggaatgatttggacagaagggaatgtgagaaaggctagataagatggaaacttttctgccacaggcataccttcccagtagacgaagtagagatacaaataatgtagcgaagggtactatggaataaaaaagtcaataaatttatttatttagtgattacagctacgatttgctaagcaattaatatatgtcagacattaagccaagacctctgcagatgatgccatgtttagatcttataacaacctagtaaatgtgttaggatgatcaaatccattttattttatttaaattaaatagttaattttaatggatagaaaaaattgtttatctttatttcattcaacatgttgttttgaatatatatatatgaatggctcagtcaagctaattaacatatttattacctcacatgcttatttttttgtaggaagaacactttttttttttttttttggagatggagtcttgctccgtctcccaggcaggagtgcagtggcttgatctcggttcactgcaacttctgcctcacaggttcaagcgattctcctgcctcagcctcctgagtagctgggactacagcctcacgccgccacatcctgctaattttttgtgtgttttagtagagacggggtttcactatgttgcccaggctggtcaggaactcctgagctcaggcaatccgcccgcttccgcctcccaaagtactgggattacaggcgtgagccactgcacccagccaagtgaaaaacacttaaaatctactctcttagcaattttcaagagtataatacattgttatgaaccacctgtagaatcaacatgtacaatagatctctcgaacttatttctcctgtctaaatgaaattttgtattctttgatcaatatctctgcaagcctcacaccctcctcccagtctctggtaaccactattctactctctacttctatgagcccaactttttagataccacctataataagcgagatcatatgttatttggctttctgtgcctggcttattgcacttagcaaaacttcctccaggattatccatgttgtcacaaatggtagattttcttctttcatgtctgaattatattccattgtgtgtgtgtgtgaccacattttcattatccattcatttgttgatggacatttaggttgaatccataccttggctattgtgaacaatgctgcaatgaacacgggagtgcacatatcttttcaatataatgatttcatttctttgggatacatactcagtaatgggattgctggatccatactcaatttaaagatatagaaaacaagccataaatatttatgtcccccaatatccaaaagttaatcaatggccaaatcagcttaatttgtctgttttgtttttactatcaaacttaatacattcaccaatgctctttttcatagttgtagccttttcttgaagattataacgtttagtagtttagattgttatgtagacatgtggtgattaaagtaactcctgcaattaatttaactaattttagttatcatgtactacacttttacatactatttccctcaaaaatgttaaaaagcctttcttaaagcctttttagcagtgccttttatatttattcgtgttactgtttcatcaattgctttagtttggtgacagtttcatgtagttcatttactggattcaagttacagtccagttacttgaggggcccaaaagttaaggacttctgaaagtgcgtgaattgcttctactcactgatgcatcccaaacattcagatcttgttacctgaatcaggggttctattctttaaagttccttggaggatactatcagaatgaaaagactcaaaatagaagtcttccggaatacaatgttgtggttttaaacttaaaagtattgccagtacaacgttagtatctactgaggtggtcacactcattccagcaggtcacatactgagaactgcataggctttgtatggtaggccaaaataactttcagattgagtccatcaattatttttctaaaaaaaaaaaaaaaaaaaaaaaaaaaaacccagagtttttgaaaaacctacttagtcatttggaaaaatactatgacattgaaaatcatattcctggaatccctaaacattattaccaaaaccatcggccacagagctgtcttctactttttccccaaccccactaattccgagtgtatctgttcttaatattcaggttatacttaatattccatcttaatattttattttaaacacgttttatgctaaaaatttacacatatatttataatgttctttctttggggatatgaggattctactgctgacctactgctgaagtactaaaaaatagtacttcagtgtgtacagtaatagggttgagcaatttattcatgtcccagccaatttccaagtatccacacacatttcattggcaaagtattcatatccactcatcagagtttgtaatgtaaactgtttctaaagaatattttctcactctttcagaggagaaaatcagtgtattttaaaacataaagctaataaattccatcacacagaaattaacttcaatagggctgtggtttgaaatatgttgtaatccactgaaggaactcaggtaaaactagtaggttagctaatatttattttttatttttatctttaagggacaagatctctctctggcacccaggctgaagtgcagtggcatgatcatagctcactctaaccttgaattcctgggctcagatgattctcccacctgcacctcctgagtagctgggacaagtgcacaccacgccctgctaattttctttttatttttcgtggagacagggtcttgctatgtttcccaagctggtctagaactcctggcctcaagcaatcctcccgcctcagcctcccaaagtgctgggattacaagtgtgatccatcatgcctggtctagctaacatttttcttttttcttatttcataaaattgagactcactttgcatccatagacttatggaaacattttgaatccagatgccgtagccatttttttgtttgttttggtttgtttttcaatatcaatagaatcttttgtaagcaaaagaaagcaaggacttctttaataatttctgatttttatcgtggcatttcctcactctcctcatgccagcatagtccaaagttgctatttgctcaacattattcaggtacttaaatgtttaaacttgatagtttttaatgcatctataaatttaaacataattctggaaagcttcattttctataattaaaagtgataatctatcttattttaaatgtatttctgtcttgggtatcttttcctaattaaaatttaaactcttattttacaatgagacgttacctcatttatttttcattaaacaaataaaaccagacaatccctgaaaaacctatgaagaattatctttttaaaaatataacaaatccatgtgatgaaaactatctttttacatcaccactacacagaaagtttttcatttttttatgtaatcactattaataaaatcatccatgtaggacaataggcaattatcgttaacacctatagcaaagcatagataaagttgattttttgtttttgtttttgttttttttttaagatctcacttctgttgcccaggctggagtgaagtggtgcgatcttggctcactgcaacctctggctcccggggttaagcgattctcccacctcagcctaccgagtagctgggattacaggggtgtgccaccacacccatctaatttttgtatttttagtagagatggggtttcgctataatggccaggctggtctcgaactcctggcctcaagtgatccccctgccttggcctcccaaagtattgagattacaggtgtgagccactgcgccccaccctgacaaagatgattttactttatcttaacctcatcctcataatggggtttgataattacatttcatattttgatcacttaaaattatttttgttagtagcattagtattttgtacatgaggaaaaggtgctatgtaaccatcaaagtacagttctctttctaacggtaaaagtggttgtgcaaaatgtagcagttaatgtctataaataggagacatagaattctatgtttctctcaagaagaatttctgttaaaatataggaaaaatatatcaattcatatttggtatttatgtagattatgttatagtactcctattttacttttgtaatttaataagggaaaactttttaaaatattcattcagtgagtaactttattgagactctacaatacagtgtaagatttatataccaatactacaaccattttactgacagaaaaataaaaatctagaacagtttcagaaatgctgcctttttatgctgttctccccaaagcaggggtccccaaagcaggggtccccaaaccctgggccccagaccaatcggtccgtgacctgttagaaaccagggggaacagcaggaagtgagccccgggcaagcctgagctctgcctcctgtcagataagcagcagcattacattctcataggagcgagaaccctattgtgacctgcgcatgcgagggatctaggttgtgtgctccttatgagaatttaatgataaatgttgtaatgtgcttgaatcattcccaaaccatctccccagcccaagtctgtgaaaaaattgtcttccacgaaaccagtccctggtgctaaaaaggttggggaccacttccctaaagcttagggggtaggtctaaatattttctcaagactcctctaagtaaacacataaaagcataattttaatgaaagcacttgtatattactgcaaatgtgatacctgaacttttgtttgcttgctttcttgtttgttagcttttgagaatacaattgtttttattacttagagagtatacattgaaggaaattataagaattttcatacttgaaagggacaaaagaatatgcaataggaaacagtaaaaaaaaaaaaaaatcatgtcagggctttcaaacctatctgcagaattcctttcaagtttcagtcctttgggggagccttttagctctctgcaccctctccttctgcttatgtgtaagccttggtgatgcatttaccaaacccttcatatctgtaatcatgaggtagcttttctccttcattgtaaatttagggatagtagaaactgccttatttaacattgtatctcttatataaccttacatgtaccatacatacatagagtctatgggataaataaacgtttatacaaattaaacatgagatggatgaagagataaacggatggatggatgaatggatggatgggtgcatggataaataaataaatggttggatgaatatgcttataattatttctatgtaaaatatttttagtgttaatgacccccaaagtgctcttaaagctccaattacctagttaattgcacatagtacaaaattcatagaggtaaacaaaaaagaacgcataaagaaaattgtttctcctattatgttagctagcctcctagttatcctccttctctcttactgggggtgctggcattgcggttttctgtgtattctttcagatatctgctgtacatacatgcgcatagtcatacacatggccacgtatatcagttcaaatctgtcaggaaggtatgagaacatcaatttcctcataccataaaaaacgcagtatactaccaaacttttgatctttgccaatatgattggtgaaaaactatgaaactatgtcttttagtttgcacttatctactcaggaatgaggatgaacatattttcaaatatttaagagcaatttttgttactttttctctgaattctgttcgttttctttgcaagttataatattccttccaaaattgttttataaccagttgacagatgggaaccagtctctaggtggtatcagaaacagtgttatccagcatattcaaacctaccaacttattcgatttatcactatagctaattgtttgagtagttcatacatttatttacactatcaagaaaaacagtttcaacattcttgaccatatttaaaaatgccttttaggctacaaaggtagattgaagagagaagttccaaacagtaatgaaggcctctattccatcccagggaatttgcaaaggctctttcctggacaaacttgtgctattattttgcatgatggaataattttcatccttcaaatctgtttaattgcacatccaaaaaaacaccttctttgactatgaaatccagactagttctctctccttccctggactctctattttaggtactttctatctgaacatcttgtttatttcttcaataacacttattatattgggtgattatgttattttgtcatttatttgctattccctacaatagattggaagttccatgagagtagtttccttgcatgtcttgtttactgttttatcttcactgcttgatccatagtgtggcatgaagtaaacattcaacaaatatgtgcggaaggaataaatgaacatacacatctaatttctggtgtgtttatcaaaaattcaattgtatacttctggtagactgaatttaattcaattgagtttttcccatgtgtgataagaaggatagggaaagggacagatggaggatgagagggtaggagagaagaagagagaaagagatgggagggaggagaatgtagactctccaaggagcctaggctttttactgcatttatttattcacaatttactgcaaatgaatttcacagacacagaaactgcaagcttagacaccatcattgctctgagacaaatgcatccagagtgtatttgaagttcagatataattgatagataaatgtaaagctgggagaaatttattaaaaatgattggtaactcataactttcaaggaagtgaattgtttaaaaaatgtacataatacttgggttagatactgtgtttcttagttaaaatataataatatatgtatttcaatagatcatatatgccaggagacacctgggcgtattgactattacataatagtgattatctttatccatctagtgtttgattgaggacggaggttgatgtatcaaattaaattaattgagatctaagaatgacatcaataaacaaaatgttaagtttcaatcttcctttttgcatatgtactgctttaatctttcggctattgatcaccagttatgtttgcaaagatcacatttaggctttcctttacagagagatttaacttaccctttaaaccatgagtcagtgcttttagttttggggatttagtttccttaaagccctctgagggaaagaagggtatatatagttatatatctccagagaaattgaatatcaaagtctatataacatgtaatttatcaatgattattaactcctgcacttgcctgtgactgcctgtatttggtgatgaagaaaatatagaaaagtagatgattagaatagggaacctaggaaataggaattggaatgtagataatctacagaacaaatggtatcttcttttatttcaattgtcatttgaaaaactttctttgaagagtaaataaaatataacaaatcgggactgaattcagtagaatagactgaatactactaaaacataaaaaataaaagagctaaaaggtaactttaaggtgtagctttatgttcttacatttatggcatgagtgcaaggaaaggctcaacagttacatgcatccatttactttatagttgaatagtaaaaaataatgcagtgaaaagtaatacttcctagggatgttcttagacatgcaacctgatcaaaaaagtataaaacaggttggatagtatctctggaatctcccattaataccaacaatgccttttcatcaaccaacactatttgccatagtcttctcaattctatctggacttcctgattttgatcttttcaagccaatccttttacacactgctctcagacttagtcatctaaagggtctttgatgatctccattgtcttaagttagaagtcctaagcctggcctacaaggttctctattttttgtcattttcctattttgacttatttcctccactctttgactgtcctacttaaactttaaggcagtctccttagacctggaatgctgtttcccactttctcaacctaccaagcttttgaacgtcctttgggacccagacaaaatctgatctttgccgtgatacatttcattaattctctgaggtggaattagtctccctttcctttgattcttctgtagcacctgtaagaacctgtacaatagcaggtatcatattgcatggtaattattttccaaatgtccttctcctcattccaattatgtgtacttcaagggccaggacattgaatcattgtgtgtatcctatgctggaaatatattaagcttccatagagttctcatgtaaattattgtgaaacatttttaatgctatgaagaaagcattttaaatctgtttaagaatacatgttgaccgggtgcagtggctcatgcctgtaatgccagcactttgggaggccaaggcaggcagatcgcttgagcccaggagttcgagaccagcctggacaacatggtgaaacctcatctctgcaaaacccacaaaaattagctgtgtgtggtggtgggcacctgtaattccagctacttgggaggctgaggtgggaggtttcacttgaggcgggaggcagaggttgcagtgaactgagatcacaccactgcaccatctgggcgacagagtgcgaccttgtcacacacacgaaaaaataatacatgttgaaactttgggaaggttttgaagcaagttttgattaaataggacttagatttcaggagtcagttttatcttcaatgcactcaaatttttcagataataaaattatttaatatacagtcatactaataatatagacccttgcaatagataagttggtgtgtatgcgtatgtccaacagaggattcctacagtcacatatattttagccataaaataggaaatctaaataagcacctttgtcttagacttcagcacaataggtcgaaccttcatttgaatgtgactagggactgccaagtccctactgcctatctctaccaaaggctgatctggaagtgaacccttttctttctttttttttttttttctagcagatgaatgttattgagtttatctgtggtctagtgatgatacctgcagagcagcttcatttttcagagtcattcagaaagctatcataagcttcttccttcttgtcaggcagagcaaatcctggcatgacaggatgtactgggagtctccgatagtgggaactgacaaagatgtgccttcagcactcccacaaagccatattgtctttctggaaatgaggaggatttattcagcaaatctaagtgtaaactaggagacccatcagataaaatccatacaacaaagatcaccaaccattttttcttcttctgaatagagccagaagatgcaatttaccttcttctctttttttccccagaagtgacaatatagagttagagagaaattatagagcggagattttgaaattcagtttcctccccaactaccagttgaaaaagcatagccttaggaaatgttctcatttgatttcctatgttttataacatgttatgtttgtgaatttgtgtgtgatgtgtggtggtggtggttccaaaatatctaagatatatagtaaatgagcaaacaaaaatagtttgtagcttttgatatatcatagttgtacatattttcgtgttacatgttgtattagttcatttttacacagctataaagaactacctgagactgggtgatttataaagaaaagaggtttaattgactcaaagttccacatgactggggaggcctcaggacgctgacaatcttggcagaaggtgaaggggaggcaaggcacatcttacatggtggcaggagctgggggatgtgggggggggggaagtgccacacttttaaaccatcagatctcgtgagaactcactcactatcacaagaaaagtctgagggaaatctgctcccatgatccagtcatctcccaccaggtccctcccctgacacaaggagattactatttggcattagatttgggtggggacacagagccaaagtatatcacatgtaatattttaatcatgtatatactgtataaatgatcaaatcagagtaattgggatatccatcatctcaatccttcctttctttgtgatgggatcattataattattctcttctagctattttgaaatatacaatgaattattgtttattatactaccatatactagaaaaaatgctctttaaacctcatcagaacacttgctaaattgtctttctatatgcttatgacaacagtaaaaaacaaagatcacatgtccaatattactgggctgtgcttggaaaaaaatattttactcttttttaaactttagccaattatatcttcaatagatatcaacactaatatcacatctttaaaaagtttctatgggttttagtaaggtatataaaaccatcaaatatattatccagagagacaatatattgacatttaaaatatgttcttactcatttatggtatcacctactgtcagaggtaaagtaaatttaatgatgtctaaagggattacagttgcttaaattggctagagttttatatgatttatattttcattcttttctggacattggaatcaagtagtaaattttgaaattttatattatatttttacttatcctgtttacagtatcacacctgactcaatttagagtagaaaatatttctagttacccttcgtcagaatataaacatcttttcaaattcatttcagcattttaattgtgttaatagaaatagttcaaaaatatagcataaacctcagcatgttctattttggagagaaggaggacaatgattgttgactctgatggatagtttcccaatgtgaaaagagtaaatttttcttcataataatattttatttcatttcatatggtactctaaaataggcaaaatatacctttacctctcttctgaatactagaagtagaagtaaatgattttattattgacattattaattatactatatttatgttgatatgatgccttacagttcatcaatcattttcatatattttaattcatttggccctaatagctgtgaccacctcccagaatagcccagtcaaaagaggttgaaaagaaaaatcatacaaaatacccatgaagtttaagaatttatggcacttgaaatatttgcccttagacaatgttcttagtatttctgagcctcagtttttaatacatgaataagaatactttaagtattattcttccacataatgggaataagaatacttactccatgaaatgagaataagaagacttactttatgtagctactgagggagtcaagtgaggaacaattactaatgccatgacacagtgtagatgctcaatactcatcattcagtttccccttttgaacttaaggccagaaagaagtgacttcagtggtggtactaaggagagagggggtgatttagccttcgcttaacattcatcagacctcacaccaagccacaggaagcaaatatacaatctctgaaaatagggaaacctacattcaagacaaatcctgtgtgtacctcctccccttcctctcccagaaaagatggctatgtctgaatcacaaaatgtaagcggtcgcctaaaaattcagaaatcaggataaattatattttacctcattttaacaattaaaatcaatgcaaaataattcatatgagcaaaatattaaaattttaagagaatacaagatgtaatcttgcattcgtgccactcatgttctctggcctcatccttatctccacttaaccaccaactgaaggactagaaagttggcaatgacataaagcacagcttcctcatgccatcttcccatgtccccccaactttgggatagtaaacattgcctgaatttataatcctgtaatatttttaaatgttttatcagatacatatgtttcaacaatatttgttccagtttagtgtagcaggtaagactgtgggtttcagagcatttccacctggatttgaattctgtctacactaattactggatatctgaccttgggaatgttactgaagttctctgagcctcagttttctcatccaaaaaaaaaatggggacaataatagtaaatatgtcatagggctattgtgaacatatgtgagaacattaaaaatatttactgtatgacacaaaatgttttagtttgtttttatatttaaatgttattaaaaagatatttgggactcatattttcctcatgcatcatcccatccctagaatttatcttgattgttttgtgtagcagtcgtttctttgactactatgtaatcaggttaactgtccattttcctgccagagggcatttgggctgctcgaagatttttcgtttattgtgttattttgggcagtgctgctaggaacattctcctcatgtttccttttgcaaatgcctctctgtttttgatgttgcagatggattttaccttgccatggcatgaaatccaaaggctgtacccacagattccgatatttatctcttgcttgtccacacctagtaataaactttagccaaagcaaactgttgcttgttactatgagcctaaagtcgctgtgctggtccctcctgaatccttttctatgagtcgcttagtactcttgctctcaagctctggtctgtaccgagctgacagctttttttatttctaggactttattgctgttttaaagtctttccactctgaatctgtacctattcaccccagagttagttgcatttctctgtgtctctaacctgagggtcatgagtctgactttgctcagtgaaggcaaatattttcttcctctgcagtctgtgttcattttgataatgatgcttgatggggggactaagcatccccctgagaggaaagaatctcgtttggattgtaatttgtcacagtttgtcttagtttggatttctttaaaagctaagcctgaggcgaggactagagagcaactagctcatttggtagctgatcacagggagcacaagtgggaggcaggggaagtaaggaaaaacgggggaaaacaatagtgagtgtattattcagctggctactgcagtgggaaactgttgttcaatcctgtgaagacccctctgaggaatgctgtagaatgtactcataattgtccctctgaagaataagaggctggggaatatgtctctggttcctgtgcctcattaattatttctcagggacatcaggtcccctcctgtgtgttggatgagtgagtttctataactttggacaaagtcgtgaggctgaaacacagagaagcagtgggtgcttgacctggtgggctgttagcatgcccgagactctccattacagggctgatcaagccagaggtaaaccaacagagtgggcagtgtctgctacacagttccaactggatttcccaattacctagtgctatggtcttctttgacaacgtgtctcaagaaggtaacctgtagctctagcccactgctactgaatgtttcatacctggtatcatgtggattataactgtagtatttcatttttcaggtattgtagtatcgaaaagccctatagcctgttttccttagtataaattttgattaaattatgcaagtccactttaaattcacagtttgatgttatgtacttaggaggcactcaataaatagttcttaaagcaataatttttaaatgactttttgtattatgtagacacatattaactataatagagcccttcggcaggaaaactgtttcttcaaagttgcaaagtgactgacaacgatatatataactagaagcttcaagaaaaatgttaccaggggccacttttaaactagggggaaaatcgtttttcacaataagctatcccatctcctccctactgaagcctctgatctgctatgattattaaaccctcatcttttagtgcaagaaacccagcaagctgaaagggaaatgcttttcagatttaaaaaacaaaaacaaaaacaaaaataaacttaatttcttttaggttgatgttgttatactaacttgccaatcagttaaacatgtatctgtcttttaaaaatatcttattacataagaacaaaagattttaagacatacagtttcaatcataaccaaatgtgtttattacttcgaattttccacagtaacttgaagccatctatgtacccatctccaattccatcgcttccccactaccaccagagataacggtggtcgtgaaatttgctttgttttatagtcttgctacatatatatgtattactaaaagagaaatagtcttgctctgcatgcttttgaacttcgtatagttggaatcatattgcatttattcttctgtgactgtttctttcaatcagcattatgttgctaagattcatccatgtctgtgactgcagcattatgtcatattccgtcatagaaataacccacaatttatttatgcatactactgttgatggatactagggtcgtttccagttttaattcttttcctattacaaacaaggttccttgtatacatgtaggagtgggattgctgggtcacagggcccatgtatgtgccctctggtatactctttggctcctttacactgctctactgtgtaccactgggagactgacctttgtagactgtgtgtgccaggcttccatttccaggtgacttccagctctctttggctgatggtgaaggattggaaactcagggaagacacaagagtgcttctcttcctctctttgtgtttcaggcagtatctttggcaacagctgcatatgctttgatgtcccccctccaaccagataggcccactatagctgcagcttccaatgaatgatctcataacctcattcactgaattcatgcaccctgccttcttctttcctcctcctccccattccttctcctcttcctcctccccatcctcctccttctctctctctctctctctctctctctccccttctctcccactcttcttctctcctctcccttcctctccctgtactttaagggtaatagtggcttcctgtggttgctaaactctgagtcactttgtcctccacagcttgtcaactctgttcttctctcatttgtttcaattctataatttaagctttctgatttaaatatcaaatgactttttgtgtctgcttagattctgactgacatgatgtatttctaagtttccaagattatgccaaattatttttaaaattggttacaccaatttaaattctcacgaacttaaaaattctgcttgctcccaaattctaacacttgacaatgtcaaacttaacttttggctactctgttgagtataaaattgtttctagctgtggatttactttgaattgcattaatgaaaaatgagtttgggcattttttcatggttccattggcaagttttaaatgcagacaattgtttagaatacattatttttatttaataaaactcattattaaatgtatattcctttaaggctgtactttgatttagtgtaagtagtacacaatttacctcagttttccgttttatgtattcactcatttaatttagcagatatgaattaagttctacaatatactatacagagtttaatgtgaaagtaagaaatcagaacatgttatggctaggataacttgggagcacagccttttgaaactggtttagtgttaggatacacatttttgtgtttacctctctttcccaccgccagtttcaccatcattcataagatcaatgactgtggtacattacaaatataatgtgaaattgtttacaagatttagtattgttcaatcattttgcaggcactatcatggaccttcagtgtcaataaaggattcagaggttccagaaaattctaggctatatcatgccttgagaagtcctatctaataaatatatagaccacttttagagtgtaaaggaattcgtaaaatgtgtcagcttaaaatattgaaatagcgagggtgacttttcctttccaaactgttgatgaagactgcagacagggataaacattagctctgtgtggacaggatagtgtctgttgtctgagattctggtcatactggtttaatacccataattgaaagagctctaagacatggctttgtggagaaagaaagatactacttgagagaaagcaagttcatatttccttttactaataagtgttcagattcctaaaatactgtaacagtaaaaagatattttgaaactttctaagaaagtgtgttctagggcggggcgcggtggctcactcctgtaatcccagcactttggggggccgaggcaggcggatcacgaggtcaggatttcgagaccagcctggccaacatagtgaaaccccgtctctactaaaaatgcacacacagaaaaattagccaggcatggcggcgggcacctggaatcccagctactcaggaggctgaggcaggagaatcgcttggcaggagaattgggaggcggaggttgcagtgagcccagatcacaccattgcactccagcccgggtgacagtgtgagactctatctaaaaaaaataaaagaaaaagaaattgcattctaggggtgaacatccacatgtacctgggatcaatccttccacagtcatatcttcacatcataattctaaccctaaatcatcaagaaaatattatgttagacataccatacataagaagggaaagagagctgtcctacataatcattttcatgtaaacctttcatccagaagttgaggtgttctgtcatccaaaggagtagctctcagctgtctggaaaacctttttgttcagaaggacatttgttgtgctttggtttaccttgggttttattgtgccgcgtgtgtgtgtgtgcaattctcattctattaaattattgtgtgattttgatacatttatgtcagggattagaaattttagaaatagattatttctggttttctgatcaatgtgtcctgtctatgtattttgtctttgtgcaaaggaataagactaaaacacaagttatatgcctgagtctacaactgagtgttgtaaaccaaaattccaaatgaaagaaagatatggggtggatggcaggattagagaattgaaagagtgaagaacaaaaggcttgcagacatcagtaaaatatgctttcttagttaaaaatagtaagaatgttttggaatattttacattaatttcgtttcccactttttctttacttttgcacaattaatgatttagtttttgagtttcaaatatttggccaagcttatctactgattgaattcaatttcttactggatgtgtgtactgcttttttgttgcattcatggcataaattttgtggacgcatttctacaaaaaccgtggattcagcatgttgcagagtactatggcaagaaaactgagtaacagactaagctgagacttggtagaaaatatctgttctcctacaaggcttgactctctactgttacttcaagaaaatattatgttaactatatgtgttatacttaagaaggcagaaggatactcactcctctgacgtggcgagatactcctcattacccccacggaaatactatctagattgtgaactcatccatagaatgactacatatgattcattttgtgatttccctaatatgtattgagtttaaactacattgaattccctggagtttgactagaaggttgattatccagtagagtttcttgtaagaaattcttatagcagtgaactattctttatggcagataaatcctacctgtgtatactgattttctttcttagtaccatagttatactcaggttactttttttttttttttttttttttgctcatatagacaagactacataatcctttttagaaagggccaatatcctatttggaataaaaacaaaacagttagatggtaccagggtcaccttaaattaacttatcagactatcaaccaaatcgaaatatgatttcagatgtaattaacccatttgcctagtgagatgcaaaggtgtgaggatttcttgaacacatctttctcttatgtagcaaatatcaacctcctgataccttttgtagtcagttcacataccatgacaatacatcctaaattttcaggtgtgatctaaccagcataggttcacataattggcatgacacggaatttttaaaatatcaactacctcaggaactttattcatgtgaatctggaagatcctttttggtatttgagccctttcatagattcagatgtcaaagtatttttagaatgggtctgtaaggcatcattattttgtaattataatcttattgattgacagcaaatgctgtgttccatgaaaatgttgcattgaagtgatcccggttagtgctaaagacagactgcttagatctaaagtctcatgagaagaaagaaagaacttaaaatcattttaaattcaccaatatgacgatacaggatctctcataaaatgctgaaaggttgtttttgctgccagacttttagcacttccgttttacgttcaaatgttgtaaaggttgattactcataagttaaaatgtttggtgcaaaatgtactttaaaaatattttcagtgttttttggaaattgtagacatttgattttgaaaagtaggccagaaatttggaagactacaagccatatgatggctgatatttcccatggaaaatataatatgcagctgtgctctgctgcatggtagaacaggagattaaaatatgagaaattataataccgtttgatgatgatattaatgtcactgaatcaaataaagtatgtgatatatcataagttaatagaacaacacttaattattgattagagcctacatcacattttaaattatcggcatgtttggtcttgcaaagggtcaagggtgactcgtagcaacagaactattctcctttcaaaaagttagcagaaagttaatatcaaattctatgaggtagagagggatttgggctgaggtaggtcaggaggaacgtaaagagatgtgtcatgtgtagatttgtgagctgtgggcacctgattttgtgtttaacagtatttacgaccaagataagtgaatgaagagctatgttcttatgaaccttaagtttattttgctaaaataagtaagaaaattcaaattcaaattaagctatatagtcttgcaaatttcaggtctctgaggggtgtgcattaataagtattcaaaagtattttgtcatttaattactattatatgaatttttatgtaattgaattattcttgaatgttgagaaactgtctttactaggctaaaaattcccttagtgatctcgttacccaattcctttgtgttccactctcagtgtctgaattgtcaccaatatgtggagtccaaattatgaaatacaaagctttaccagaattctgatgattttgaaggaagaaaattacagcaaattttgatcaattctctcctattagtgattaattcaatgaaccgcttgaatttcttatttcctcgtagaactgtatgtacatgaaggatagatacaatatttagtacaatctatagtgagatatgaagggaaggagattatgagaaaagaataaaactttattataaaaatgcttgttcataaagatttgacacaaaatcaatatgataagttttcagaaaatcaaacaatgaatttcgtatgaaacctcacattggcaaagcagttatgtgaataccaatattttttaaatctaaaacaaagcattttgaagtagtttcatgaataatgtactgaacctgtttcacgcaatgaaatgaacatcacagtgagaaaattattccacaattgtaaagttaagtgaagcttgcattataaggccaataatactcaatagggtattttctcatgaatttacactatagaatgtttttattctggaatttggatgatatcatagtcattcaacaaatacagagactaagtgatttttaaaatctttcaggaaattagttctttaatttcatctacatgtatgtaaaataaccaaacctatgtcttatgcatataatgtcattctaatatattgttcatgatcataatatttatatagaatccattttgcttggccgattgatttggcttggcctacaaattagtacagtccctctcaactttgacacttctgtgtaccatcagctccttcctggagtactgaaatagcatcctaactgctctctctcatgtagtcttgaccccatctataaatcctaatttcagcatttggagcaaccttttagaaagatcaattaaatcatctcacctcttcattaaaacgcctctcattctaccaagagtaaattccaaaccttttaaccttgacctacataactggaccatgcctccctcgcccatttcaattcagctttgctcttgtagctccaggcaagctagctctgtcttagttcttgcatgtaataagctttcaagtccctcggtgtctacttatttactgttccctctgtattagtccattctggcattgctgtaaagaaatacctgacactggataatttataaagaaaagacgtttagttggttcacggttctgcaggctgttcaggaagcatagcagcttctgcttctggggcggcctcaggaagcttctaatcatggcagaaggcagacggggagcgaggtgactcagacggtgggagcaagggcaagagagacagcaagtggggaggtgctgcacacttttaaacaaccagatctcgtgagagcccactatcgcgagaacagcatcaaggggatggtgctacaccattaatgagaaacaccgtgatccaatcacctgccaccaggccccacctctaacattagggattacaattcaacatgagatttcgtggggacatgaatttaaaccatatcactatctgactggaatgtgctttgctcctgcttctacttccgttttctgagcaatcagacagttattcattaactcattcattcattcactcactcatttgttcatttatgtattaaattattcagtgattctcaactctgggtggttttgccgtccaggggttatttcaccatgtccggagagattcctagtggcataactaaaagaagagatgtttgctactggtgtctagtgggtagagaccagggatgttgctaaacatgtaataatgttcaggtcaacccaccataataaagaatcatcttgtgcaaaatctcagtagcaccaagattgagaatctctgcaatacgtcaacaacccttctaggtgccaggaatatgacagtgaaccaaatgaatatggtctaaactttcacaaactaatccattaaggagaagatagtcaataagctggctaacaaacaattaaatgtatactttcaaattatgttgggtgctctcatggacaaggggacaagagagtggccagtgaaacctaatttagagcaggtggtgttgggggaggtggtgtttatgctaagacccaaagaatgaaagaaagactcagccccaacttatatatatagtaaacatttattgaatatcaatagcaaaaagttgcatttttctcaaccatgtctttttatggtaactggaaattgttcaaattattttttagaatcttttaatcatagattctttgctaaggggattagtctagcatttttctcttgtgagcaattaagttctcaccaagttagtgaatcctatgtcttatgtacttcctacttattactatgaaattatctaaaaaatgctcatagggttcctaatgtagttgaaaagcaaactgttgctgcatctctaatcagtaacaaaacttgtatttctgtcgcaaaataatgtaaaattttatagtactttttacatatttatttaaaacaattttaagtaagattgtttctttgtggaaggtcatatggtcccaatatagggatgtgtacagaaatacatatatacatacaacaacacaatgttaaacctagcaaaagagtggagtctctttcttttatttttcttactttttgagcaacgagacaagcaacatattatgcctagtcacttgaatcatacaccattaaaacattatgggctgagtgcagtggctcatgcctgtaatcccagcactttggaaggccaaggcaggtggattacctgaggtcaggagttcaagaccagcctggccaacatggtgaaaccctgtctctaccaaaaatacaaaaattagccgggcgtgtggtggtggatgcctgtaatcccagctacttgggaggctgaggcaggagaattgcttgagcccgggaggcggaggttgcagtgagcagagatccgccattgcactccagcctgggtgacagagcgagactccatctccaaaaaaagaaaagaaaatatgaaaagaaccatttttaatgtcaactactgctttgatgctaatgtctgtcagttcagtgtctatgacttaccctttattctgctcaaaaccttcttgaattttccatttgaatatcccacaggctcttgaccccacttatccaaaattaaacctatcttcctctctactacacctcttcttataatctttctcttgctatttctaaacatttagtgggccaaataaataccctaggagacatgacttgaaaggggtatgaagtttagataatgttcggcttcttgatctgatactggttaaatgggtgcattacatttgtgaaaacttattgagtcacttatgacttacagattttctctatatattttatattttaagaaaaaagattacatataaattctagaagccaagctacacctttccctcttattcatccagcacatttactgagacagctagattttcataatgactgtccattgttgaatatttgctatatctttgatattgttatccattattaacttccttacctggtttgacagttgaaaatttctgtggtgcagctattattatttccatttcacatatgagcaaaaagagacttagagtggttaagtaacttgtctaagttcacacaacaacaaagtggcaggagtagagtttgaattcgagtcaatatttataatcactatgatatcttgcttctcgtgttccagtcgcattaaaactatgaatgccactcccactccttatccatccttactacctggcttcactttagatcttcaggtcttctttcctatattataatgataatatcataagaaatccagtgcagtttagtctattccaaaatcagtctaaatactgccaggattagtgttcattccacaatataaatctgattgtgtagtttacttaaaatccattaacacagccgttagcaaccttagctacatgtgaaaatcaccaggctccacccaagataaattaaatcagaatctctgggtatgagggactgggagtgagcattttaagaaagctccctgggtaactgtaatgctcagctaggcttggaaaccaatgctttaacgtttccctacagcttttattataaaaataaacccctcagcattgcacaaaatgccctttgtaatttggtttttgccttcctctacctcgcctcctctgctgtaattcccttcttctcccactttttccccaccctacctacatacatttcattgcaattattcaaaagtctttgtttcttctgaagagttatgatttttataccatacccttacacataccagtcttcccctctaaatgcttagttacattatctttgtacttaatccttttagttgctgataataaatgaaaatttctttttagtttctttttttttttttttttttttgagactgagtctcactctgtcgcccaggctgggctgcaacctgggctgcaacctccgcctcccgggttcaagggattctcttgcctcagcctcctgagtagctgggactacaggcatgagccaccaagcccagctaatttttgtatttttagtagagatggggtttcatcatgttggccaggctggtctcaaactcctgacctcgggtgatccacccgccttggcctcccaaagtgctgggattacaggtgtgaaccaccgcacctggccaaatttctttatagtttcttgacttgtttttaatttagaaaatttcccacgtatatagacaccatacaatttataatgtaaagctgttttcctatatcaatcatgttttaccttttttctctttctcctatatatgctgcttcctggaagatctaggagctgacaagtgtctttttatcttgctttgcaaatctaatcttttgccatttctttttatagaaatgaaagcttgtatcatgcatactaaagatggcttcttctttgggctgtagggccatttaatgagttatattgaactgaatgctttataagagttcaaattagtacattgggatactcctatgccagggatggattaatatatctgtccacatatatacacaaaaatgtgtgttgctaatttccaaattagagaatacttattttgaattatcagtatctatgacatattttgcatgtggtatatatttggttaattaaactgagttaccacttgttttatcaaaatttggtgtctttctaaatatatcatgaatatttttcttctaatgcacctcgctttctgctggaactatagaaacactttgtaaatttttacttgtgaccactcgaacatttacaggacattttacctgaaaattttttctgagtcagtgaagaaaatgtccatgtttctgcgtgtgtgtgtgtgtgtgtgtgtgtgtgtgtgtgtgtgtttgtgtgtgtgtgatgcttgcttatgaggaatttattttggctatggttctttattttgctattgcactcttaacattcgtatgatatgtattattaccctataaatacttacacaatatattcttacaaaaattaatacaaagattggccaaaatgtaatagcatatgtttttgtaaatagaatatccatatacagtcataataaaactgaagagcgattttatacttttccataaagccaaagattaagggtgtaatcactgcttataatttactaggaaactataaaacagataaaagtagatgaaaggatattacaaatatctcaataagtcgtcctccgcaactgaccccttgctttacacatgttcagacactctatactaaactctgtttatttttctattttataattttctatatgatcgtaattcagcgttttcctataatattattagtagtgctaccaacagatattacattttatgaaaaattttaaaaagggcacatgttgcataaaactaggttttgaaacagctgcttataatgctgatatttagcacatgactaggtggaatatggactttttaatgaatattttttcaaagttaggtaatttctcatcagtcagtttcaaaagcaaagttaaaatttgtgtttcaaaaaactgggtatgtttgaaaattgtatttaataatggattttgagagttctcaatagcaaattgcttggctgactgtagtttaagaagtaataattttgaagagaagttgaatgcaggtactttcaaagtgttgaaatttttaaagaagaaaattaaccttttcagactgtacacttgttcatcttttatattcttttccctttaaaaaagaattgtagtaagaagggagattaccttctgtcattgatacaaattttccacagtataaatgctgtttatcacatttgtataatatacacttcctatcaattttaaaaattacatgttactactatttaactctgacttaattattttaaatataaaataattcattcttttataaataatcaaaactatagttttacttttctttcaaaatataccactgactacattacagattagattttttttagtataccaaacatattttcatcttttggagttattggaagagtagctgcttactgccttacattttagatttctctatataacaagcattttcatcattttggcttattcgagtaattcttaataaataataatacaatatttacaaatgagatgtcatttgcaattttaacacttcataattttaacaaaatatctttactttgagttttttactttccttttggtgtgacattttgacctccaatgtgatcttcatttaaaggaaatatcaacgaaaattccttttttttcatttgctatagatgtacatataagatttacatgtgtaaggaatatagagcaataatgaattgagctattcctcataatcacttcacttaagaaatagggggctgggtgtggtggcttgtgcttgtaatcccagagttttgggaggctgaggtggtaggattgcttgtgtccaggagtttgagtccagcctaaccaacatatcaagacattaagtctatgaaaaaattaaaaaattatctgggcatagtggcatgcacctatagtcctagctactcaggaggctgaggcagttgaatggcttgagcccagaaattcaaggttagactgagagctatgatagtgccactaaacttcagcctgggaaacagagtgagggcccttctcttaaagaaaaattgactagaatatgactaatactctagaagccctcctccacatgccacccttcccaaatgcaccactattctctcttcccaattttcatttttgtatttattattcctattcataccaacacaattttaccagatgtgtatgtattttcagcaaatatttttagtttattatgcacttaattgacactatggaagaacagcttttaagatattattccaacttagggaattttaaggaaataagacctttgtatataaaaagttaaataggaataccgatttgcttttgattagtgttaaatcacataagtttaaatttgtaggagatcatagagatcagaaagcccagtggttcacaaactttcttttttttatcaacaaaacctcttttaaaaatatatagcataaggaagacggaaccataaaactgaaattacagcagctcaactgaattgtgagtttcaactgaactcaatttcaaacccacaaataagtcaaactcttactttactgagaatatatttggaccacacagagtttaaaaaacatgtttaaatttatttagcttatttataccagaaccaatataagaatccataacattctgcattagaattaagtacaaacactttttctttctttctttttctttttctttcttttttttttttttttgagacggagtcttgctctgttgtccaggctggagtgcagtgacgcgatctcggctcactgcaacctctgcctcccaggttcaagtgattcttctgcctcagcctcctgagtagctgggactacaggcacgtgccaccacgaccagctaatttttgtatttttagtagcgacggggtttcaccatgttggtcaggatggtctcgatctcttgatctcgtgatccgcccgcctcagcctcccaaagtgctgtgattgcaggcgtgagccaccgcacccggccgtagaattaagtacaaacactttctatgatattatactaaattaaaaacaggaactcaaaatgatacaaactgaactgaaataaaataaaataatacagtgaatggagtccacaattaaaatacctgcaaggacctgaaagggaatggaaataggtgaagcaaagatctaaatgcatacggacattgtgtaaattggaaagaatactggcaaatggcacgcctgtgcccagtctaaaatgggcaactgctaatcaattcagtctagcagtgtccatgtcagaatgtagagctatttttggccatatattttatttttcaagaggaacttaagaatctggagttgtatgtaaaacatcccagtgcactatatatttgcctcataagttgagcacttttttttatgtgtgcatgttgtctactggtgaatcccaagcacttggaacagtgcctgatatatagtaggcagtgatgtatatttggtgggtaactggaaaaaggttttccaattaaaaattctgtgcaagcctgaggtaggagttgggcaggacttatttcccattcccagaggataaagtgaagaaactggcaggtaccagcaggcagcgaccaacggaagtgagaaaaacagcagaaaccagcagatggcaacaaaagtgatccccagcagccctcattgcatattagcagaagccactcccaccagcaccatgacagtttacaaaggacatggcaataacccagaagttaccacccctttcctagaaagttctaaataacctgtctctcaatttgcattaatctgccacttaatttacatgtaattgaaagtgggtataaatggatataaatacagtagccagcagcccataccctgccaactttggaggcactgcctatgagttgtccctatttcacaaagcgcagtaatgttcactaaaacatagctgtttaacgccactggctcgcccttgaattctttcctaggcaaagccaagaatcctcccaggccaagccctgattttggggcttaacctgtcctgtatcaaactagccaaatgtatctcaggcctgaattagatcaatggctaccagttcaaatcttttgttttagatattagagaggcaggaagtgactctctactgtgtagcatgatactcagagcccaggaacttcttcagaatcccagtttgacttccaaaacgccagtgtcttgcttttatttactcttgtgggtggcagtaagggaagggagcatatctccttagcaaaacatctcatcagaacacggtccatagcacaaattattaattaaagacttacgtggaggctcaaatatagagccaaagcataaccatttaacaattatccttcaaagcaattttattcttggcttttggtggaaaaaactcttaaaaataaaatgataattctacatatgggatttgtgatgctatttagcaaggatatgctttattgcctgacatcccctttattttggcagaatactatgagattctcattacgtttccatttgctgcggaaagtggagaaaagttcagagggggaagactaattaaaaaaatggttgtctactaatccattgaactaaggcttcttaacagtcatgctcttcttaatagtatgaacacacattttgtattgattgcagagaataaagaaaaagaaatgacttgttttgaacttcaaaatggaaaaaatgaatacaaaatccagataagcctttgggcataccaactttttcgacttgtattatataacaacagttggcaaatgatttcaagttgctaaagcatagaaaatgatatttatttgatgaaagctaataaatcagacagaacaattaatggataatttggattgaacaagtatgaaagattccaccaataagaaccctcctacctaaaactatgaggtttttaaatgaaagactctcctaatgtcatagattttctctacctgtgctttatctgaaaataaaaatcacagcttttcccttcacctcttcattctctactcctccttatatttcccctttccttcttccttccttctccttcctttactctttgttctttttattcctgtttgttctgattacctgtgatgttttctaaaaacattaaaattttggtcaccattaatattttttacaatgaattaagaaatttatctcagaaactggatttgaaccaaagccttgttttgaacttctaataagtagactgaggaacaagcacgattttaagggcatatttaataggcaaaataaaaaaaacgcataaaatgcccagtcgttgatgaaaaaaatatatttttgtaattgctgttattcaggtgcttgaaggcccatgttaaagtatcactggagaagataaaaagcatacttcctcaatgtgaaaaccctcaaaagaaagggctataaacactttgtcctgaatatttgttgtttcaattgctgacgtttaacttttcatctgacagcaattcaagttctgcgtaccacagtgttgttgaatctttgaatctgaaaaatattttccttgcagctgtgataataatgtatctcctgataatgcatttaatgtggcaaagacacttttcttaaacacagtgaaaactaagtgttcattttgtcattgtaaaatgagacatgtttagttgctccaaattttaacttgggtaaccttgagacatagttgcacatttaacatcctatattttgcttgtcttgcagtcaagtgaattatcttagttactggagtgttacgtgacaccaattgttttgttaccactgctttaaaaatagctctatccctagaccccatcagtagtgtgtcttttagggccccgatttttttctaatctataggttagccctcaaggcaacgtggcctctttctgtttacttctcattattcctgtaattccaattctacatgtgactctttgctttattttaaaacagttgtgcattgctgatgagccttgaagtcaccaggggtggctggtgtcaatagtgagtctgtacatggctatttttatccataaagcagtttactttctgtatgatgaaaggcgttaaagtaaaacctgcctcctattataccctaggggtgtaatcaagagggatttgatcatagcataccaattaagcaggctacagcagactgctctgggttgtactaaggagtagggtgttctccacagatttttgaaccctttattgcaaaagcatcagggcacagcacatctaattcttttcatcgcacagctgtgtacataaacctctgtatacagtttctgctcagaggctgtgctcttagatttaatttttcttataagtcattacagccgtgatcattcatttaaacctcggcaagataagcattactagttcccagtaaactagatgatctcttcctctagactgtattttctcttatgaacaattataagattacaagactagcaatgttgcttatttacactacactacacacacacacacacacacacacacacacacgttcattccaagccagcagccagctcagcatccttgaaagctctcaacctcagccgaatatataaatatcagaattctctctaccaccctcaattagaaaatgttccagttctgcttttaaacttccactccaattcttcttgctaaggcctggaagcctcaaggtttcttgtattgccttatatacacctggattattcctctctgttgaaaactatgtcccattggaatgggagtgtctgaccagctggtgcccaagaatgctctcagaaaacgatcttccacaagccagagccaaaacccaaacccttgacccttatcaaccttgacgcccaaaactccaggtgtggattagcacagtaacccgcaaacccactcctacacgaaggaagatttttctagaacaactacagctctccttttatatttttgggtaattcagttatgatgaactgaaccagaagtataaagtatttgctcagttcagttcttaatctttgtcatggtattacaatactaaaccacttgctttgtcactttcatatagctcataaaagaaaatattactgtataaaatagattctgtagtccttcacttgttgttatggactgactattcgtgtttgccccaaattcatatgctgaagccctaacccccaatgggacgatatttggagatggaacctttgggaattaattagggtaagataagcacatgcaggtggggctctgatccggtggcccgtgtaaagaaaacaccagagagcttgctcttgctttgccatgtgaggacacaggagaaggttgttgtttacatatcaggaggagagccctctccagaacttgaacacgctggaacactgacctcggacttaaagcctccagaactgtgagaaaataaatttctgttgtttaagctgcccagtctatggtatcttgttacagcaggctgaaatgagtaagacacttgtattgtccctgcggttgacatctgactctgtaaaaacacccatgcatacacacacgtacacacaaaacaacaacataaccagtaagataggtaatcaagtatatggtaaatgcacctgattgcaataatgtgcgcatacccttagaatgaccctgtactgcagacacacctgaatgtgttttccgagctacggaatctgggagtagcccagcaagagagcccttccttgtctatgaggaacatctgagccccaagtgcatcccgtggaacacgggccatacatacagcggattgaggccccgagttttgggttggatgaaggttgccaggtgaacgtcattaagggcagagggttaagtaaaaatgctatataaactgcatgctgcccgcaagcagcgttggtttgcccgctcatcccaccgccgccatcactaccactgtgctgcgaggctatcttgtccagtctgccaccactggatcgtttctacaggtaaggcacttctcctgtccagcccaccactactgaattccctcccctgtatgtaaacctctaataaaacccaatgcctcgtttgctggctatgggtttcttcctcagtctcttgaacctgatgccttcgctattgagggttataggggttcagtacaacatcatgatgtgaacaaacgcgtttatttgggcagatgtattggtcagctctcaaaacaataatatcaagtaataatcattacctccaacttaatggttttaaatagcattaattctcatggtcatgcggggtttggctgacctaagttgatctagatttggttctgcatcaggctggtagttgctaggcttggctttcagcggcaggtttggtttggatttctttgatgtgtcacgtccagaggcacacactggaatggcaccggccacccagtgcatgttttcataggttgtcactagatagcaagcccaaacatgccagcccatctcaaggctctgctcctgtcatgttttcttaacaccccgttgaccaaaggctatcacatttcccaccataggctagatatgccatcctattaagtaggaatgagaaagtggggaccaataaatcaacctacagtaggaaaagtaggggattatttagtagcacaaacagatgagtttcagtgggcttgctgcttttttgtggatatggaagaaatacctaaaaaaaaaaatttccagctccactacaatatttaagaaaaaacttaggtgtgttcatagtttactactttgcttaataaccccactgtttatcacagcaaatttaatcacctctgaggggttttaatggctttgataagacaaagagtaaattactgaggaggaagacggtcactttcacatcctgagagatgctaactgtgcaaggtaattcacatatatcttgtaaacatgtttgcaaacatatataggagataggtggtattctcattttttaaggaaagaaatggaagacatgagagaatgagtaatatgtttaagaggacacagctggaaactggtataatctggctctaaatacgggcttttgtgttacattgaacagagataaattcagcttatgttaaggaagcatggggtaaaaaggtcaagaaactgaacaactgaataaccaaataagtaggcgaaaccatttggttactcagttgtctgaccaaccgaataatcaaaacaaaaatgtcacattagaaaactacgatcagtgtaattttatgaataattgaactattgagaccatagtgtagcagctgatctatcacgtcatgggattccatcattcattctcatgaattaactactctcagtccttgcttttagcattacctctactccctaatgatacatgatttttactctaacataaacttcccaggagaaaatgtctgataaatatcataaaatcatgaaaatatctgataaagtcatcatcctgcatcatgtgtgggagacttaagtttgtaactcttcccattcctttaagttggttttcagccttgcttacacgatcattgtggccagagagacagaatgtgccaagcgtgtaggcctgagctgggaaacaatgtcaataagtaatacagtataggggatgagaagtttgccaaataatacttggtgtgtaatgttatgaaagaaagggggcattagaggccgggtggctcacgcctgtaatcccagcacttcgggaggctgaggcgggtggatcacgaggtctaagagatcaagaccatcctggccaacatggtgaaaccccgtctctactacaaatacaaaaaaaaattagccgggtgtggtggcaggtgcctgtaatcccagctatttgggaggccgaggcatgacaatcgcttgaacccaggaggcagaggttgcagtgagccgagatcgcaccgttgcgctccagcctgggcaaaaagagtagaactctgtctcaaagaaacaaaaaacaaaaaacgaaaacaaacaaaacaacatggcgtggggggcatcagaaacacacaatggtacagatttaaaagctcctcgggtgatgctaatgtgtagccagggctgaaaacctaaaagaagaatgtgcagtaatgttgccagtactggaaggaagtgtctgagttttgtctagtgactgacagaaggctatgaaactgtaacagttgtaaggggttgagggaaagccgaggccagatcatgtggatcatgtgcaaattgtaggtaaaatgtaaagctgtgagttctgtggcctcactgaggaagcatttctctgcttttcaggaagtaacttggagttgagtgctctatgatttccaagttgtcagctaacacattgaataactgatgaattatggttctgtggccttcatttctgtgtcacgtggctatactgttcattggcatatgcaggcagtaacccccaaactatgacgcgagaggatggcaggattccaggtctgaagagaaaaaatgattaggctggggaagaatgatttgaggaacctcaaatcagactatggcagcaactactaggtgtagggcttcatgccatccagccttggagttgtcagttttctattaatctttgctaacaataaaatactaatgggtacataatgtagtgatttacagatgatagactctccttatgttttcattttgtctcaacagagtccagcatatttcatccaaattttactgatcagagaattgaggtacagacagaccatgaaggtcatgacagttggaaagtgttggagtagaataaggaagcctgatttttctcatttgtcctacatcgctttattagattgtcttctccagccttacctccccgccttataattcttgattttcatgaaacctattaaagggaaagaaaaggaaaactagaaaatttaatttagatcacttttaaaaatcactttgcatcttggactgttgtcataagttataggattaaatcctaatgattctaatgttgttaggccatcttaatttatatgatccacttacctctcagtcttctctcactggctcactcacctgccctctgtatatgaggggattgagaaaagtctgtttttcattatgtgtagatacacagactggtgtgtatgtagcaggaataaatgttcgcaaaactcagatgtggaagaagtaactctgaatttttgccctatttttgaactgtactccaggccagtgctgtccaaaagaaatataagctatatatgtaatttaaactttttgagtagccactttaaaaagtgaaaataaacaggtgacattaatgttttatttagctaaaatatttcaacatgtaatcaaaaaagacttaatgagacattttacgttagtgaaaagaatgtactaaatcattaaggttggaggatattttacatttacagcacatctgaattcagttgccatattttcatgggttaaagtaaacttgttctcccaaaccaatgaagttatggttaatggaagaatattaaaaactgtttgttttcaatataaataaaattgaagcaaaaataaagcaaaatgaaaatttggcttcctcagttatgctagtcccatttcaaatgttcagtagccacatataactagtggctatcttactggacaacataaccccagatcatgataaaacgttctgatttcccgaatttcttttttttagacaatctgggatgtttcgccttcttaccaaagaaacaaaaaggtgctggtactttttgtttgcttgtttttcagcagttgccattgaaatgtgtttcttttggagttggataggaaaaacctagattcttcctccaaggtgtagtctcaactgtgccccaggcatcactgtttatgatggattaagggtgtggcttttcccagataatgagtccccctcccccaccccccacaggccttaatatctacagctcctgtcaatagactggcctttccttccccgcgaaaagtttgagtcctttaagaatctaggtctaaggttaatttcaacgaaaggtttattttctctttctgcgaggacctatggaactacccagaacatataaagcagtccacaaggctcttcaacagcttcgtaaccgggcactgctagttcagaaactcactgacttctgaatgtccatttcacatttgcaggctgcttctctgagtcctgagctcttgtctcaagatgacttggctcttaattgttgtctgatttattaccggtttgctttgcagtttaggtgctggacaatgattcttagaaatccccacataaggatctacatgcagtggcagtgaatctcaataactgccttttcttgaatctgaacttaatttatatataaagcctactttccggtagatcctgcatatttcatctcagccaatttaggactgagatgccccccctttctctggggttttgtcttaaatttctggaggggacctgattgtcacgcccctccgagtgaagagaccaccaaacaggctttgtgtgagcaacaaggctgtttatttcacctgggtgcaggtgggctgagtctgaaaaaggagtcagccaagggtggtgggattatcattagttcttacaggttttgggataggcggtggagttaggagcgatgttttgcgagcagggggtggatctcacaaagtacattctcaagggtggggagaatgacaaagaaccttcttaagggtgggggagattacaaagtacattgatcagttagggtggggcagaaacaaatcacaatggtggaatgtcatcagttaaggctattttcactcttttgtggatcttcagttgcttcaggccatctggatgtataagggcaggtcacaggggatatgatggcttagctcagagtcctgacactgatacagtgccaggatttgaaggcgggtgtggcttacctgatttcatgtacaattcatcccatagggaccttgttccttggcctcaagttgtaggccctttcatatctctgtacggtcaagaaacatggtggttcccttgtcattcttcatcctccaaaaacccattgagcactgtgtttgctggaggcatgtgggaaattattctactgtaccctatatcctgctgaagtgcctgggtactgggtggctagctcatgtccatttgctaagacacatgctcacgattcttgcctgggtctgacataactttggagtcttgttgcattcctgggctggactctggaatgggacccaattacttctgcacctggatacccccaaccttctctgttgtggtggcggttctttcaccatcccctcctctcaggaacacactcttgtttctactttacattctccatccagtccaggaaaatagtatctaggctcagagacggagaaaatagtgtctatatttcacatttttttccaaaaaaaaaaattataattttccgtgcctggacttgagaatttgaaaactccaaaatcctccaggttcaaccacattgttcccaattacaggattttcttattaaagttgaatagtgttccattgtgtgtatattccacatttttgaatccgttcatctgttgatggttacttaggttgattccatatcttgtctaatgtgaatactgccacaataaacacgggtgtgcagatatctacttgatatactgatgtcatttccttaggtatgtacccagtagtgagattgctggattgtatggtagttctatttttatttttttttgaagaacttcctgctgttttccataatggctgtacctatttatgttcccattaagggtccaaggtttccctcttttccatattctcaccaacactagttatcctttgtctttttgagaatagccattctgacaggtgtggggtgatagcatattgttttaatttgcagttacctgactaatgataagcattttgtcatatacctgttgtccatttgtttcccttaagacatgctcgttgagacatggacacggggaggggaacatgacagaccggagcctgtgggggtgggggcgtagggagcaaggggagggagagcattaggacaaatacctaatgcacacaggacttaaaacctagatgacgggttgatagatgcagcaaaccaccatggcacatgtatacctatgtaagaagcctgcacgttctgcacatgtatcccagaacttaaaaaaaataaaaaataaaaattcagttccttaatcacagttgccactgtgattttactttgtcatattttaaaagcttttttatttcaaaaaaaaagtctgttgaggtcctttgcccatatttaattgggttgttgtattgctattgagtttaaggtttcttatatatttttggatattaatcagagtgaagggacaactcatggagcaggagaaaatatttgtataccatatacctgaaaagggattatttccttggctgtgcagaagctgtttaggttgatgcaacttcatttgtctatttttatttttgttgcctatgctcttgggttcatatccaaaaaatccttgcccagaccaatgtcataagcttttagttgatgtttttttttttttttttttttttttttttttgagacagtcttgctttgtcacccaggctggaatgcaatggtgcggtctaggctcacagcaacctccaccttccgggctccagtgattctcctgcctcagcctcctgagtagctgggactacaggcgctcaccacaacgaccggctaatttttgtatttttagtagagacggggtttcgccatgtttgccaggctggtctcaaacccctgacctcatgatctgcccgcctcaacctcccaaagtactgggattacaggcatgagccacctctcatagtccatgttttcttctagtagttttagtttcaggttttacctgtaagtctttaatccattttgagtcgattcttgtatataacagataagggtccaattttctttttatttatttattttttttgagatggattcttgctctgtcatccaggctggagtgcagtgatgggatctcggctcactgcaagctccgcctcccgggttcacaccattctcctgcctcagcctcccaagtagctgggactacaggctcctgtcagcacgcccggctaattttttgtatttttagtagagacggggtttcaccgtgttagccaggatggtctcgatctcctgacctcgtgatctgcccgcctcagcctcccaaagtgctgggattacaggtgtgagccaccatgcccagctgtaagggtccaattattaatattcccaattgaatggaagaagtaaaaggaaacaaaattaaccatattctcacttaaagtcattgttatcattttggcatatttcattgggttcctttttacccgaaatgagggttttctgctatttatttagatgtgatcgtgctatatttatgacttttcacccttttttactatcacataagtgattttaggttattatagacacactttaaatgttcacataatgaccacttattctaaagttaggcatttagttttttatttttgttgttctaaataacccagtagaccattttgtttccttttagacagcttccagcgcatgaaattattaggtcaaaggatattacctttttttttgagacggagtcttgctctgtcgcccaggctggagtgcagtggcgcgatctcggctcactgcaagcttcgcctcctgggttcacgccattctcctgcctcagcctcccgagtagctgggaccacaggcgcctgccaccacgcctggctaactttttgtatttttagtagagacggggtttcaccgtgttcgccaggatggtctcgatctcctgaccttgtaatcttcccacctcggcctcccaaagtgctgggattacaggcttgagccaccgtgcccagccaggatattaacattttttaaagggtctttatatgtatcgcaaaaatacttagcaaaattattattattattattttttaccagtttacactgcccaccaagaagctataaggacacctaaattgtcacataaaactgtgtatggataaatatctctattttataaaccacttggtataaccaaaatcctgcttttgagatattaaattttgaagctaacattcttagcatgtttttaaaataatactgacttcatgagctaatacccataatgataaaatgattttatattccaggaaagctgccatgtgggattgaatgttttatatatgatacacttttatctacatatgttgttatacagtcattggtacctttttattagatgaatttatttcatattcagtttccactgaattgtattcagcttgactacaaattagtcaagcagaataagaatgtgagttttattgtgactaatatatatttggagtctagatttggagagacaaggggtgagtaaaactgtgtgcctactacctgaaaggaaaggttttttttttttttttttttttccccctcaagggaaacaattacggagactgcccaggcatttaatattttattgaaatattctaaaccctcaaatttcgcttctacattttatgtgatgcatcagaaaaacactattttatttgttttataattctccaatagggaaatttcaacacattgtaagtttctttatttaacaacatcatctagcttttaataactgactttcatacacatttttaaaagcaggctaatcgttatagcttaatatatttttcatgagatttagtgataacatgatcacttataccagtagtttatctcctgaatcattttaaaaagtaatgtgcatgttttctttatatttatatacaattgggaagcttaatatttatgaaaatatgattgacttttttttgtcatttctcttcaaagccttaggctttgcagttatcagtagtgcagttccaagatgcaaagtcataaacttacctttcattctctttagtaggcttaatattttgaatctagccataggaagcagcctgaaacctctaatcgaaatcaaagataacaccacaggggtacaatatctctaatttgtcttggaatgatgcggtagcttcccttgactgctgtgattaaattcattctggtttgttcagttaatgagattagcacatcttaacccataggaaatattgtctttatgggcctatgactctgaacagattagcatcatgatcagaaaaataatttttaataaatgattacgtgtgagtggtgctaggctaggatccctacaaatctggcaagagcatattccttgaccttcagcattatatgactttataagacacagcattttctcaggcatgggtataaatacagttaaatatgtactataaaactaaagaacagcctgaaatttaagaactacaagaatttgtgcttgtcattaagctggagataaagttaacatcctgagaagatgtaaaggcgacagtgatacacttctccttgtttggtaggatcatttccacacttgtctgtacttggaattgtaaggtgatgagtcccttaatgatttcttattgcaagtttgaacctagtgtatttcatggtaatagactaaggggaatgagtatatgaaatgagttccagtgtattgatgaaacttagagttgcgtagagtggagcatagcttagtagaaacttgagcaagttactgtagcacatggtcctggttccaattccagcaacatctgttagttttaggacttggtgcaacttgttcaaattttctgtcagactctccattggtttaaaaaataaaattcaaaatattgacaaatattgccttcctgaattttttggtgaatattaagttagatgatgtatataaagtgcctggcccatagtaagggctcaataaaagtagctgttggtaccgcttttaactaattgttgttaaattgattggttaattatatatttccctgccacttaactgtcactcaacagcttttcctcatttcctgcctacctgattggaaatcattatgttgaatatgtctagaattatcactgggcctgctgtattccctgggtggtatgtttgtataggttgaaccactaaagaaaatcttttcggatgagttactttcctatgtcaccctactatttcctagtgggaactttaagttccttcagtctggggtcaagactagtcttagtataggggacattgggaatattgaggatggcatgtttaagtaacattgtatgtattggtcaagaaaaaacaggcaagggatagagtacatcaaaaccagaaaacctatgtacttacctttccatttctgtctttattagatatgttgagtttatttcaagtgcctctatagaacatctacagaacattaatattaagaatatcatgaaaagggatacatttttaagagcctaaattttggataaaatggaagtcattttcttttttttttttttttttttttttttttgaaacagagtcttgctctgtcacccaggctggagtgcagtggcatgatctcggctcactgcaacctctgcctcccgggttcacgccattctcctgcctcagcctcccaagtagctgggactacaggtgcccgccaccatgcccggctaattttttgtatttttagtagagacggggtttcaccgtgttagccagggtggtctcgaactcctgacctcgtgatccacctggctcggcctcccaaagtgcggggattacaggcgtgagccaccgcgcctggccatggaagccattttctaacaacaaatttaatttgtgaaaagctggtagcatgttaactctagaatgacaattttttaaaaggaaaattccaaagttaaagggaaaaaatattggggtagtgccagctagtatcaggatttatactttaaaaatgcataagaaagaagcaattaccagtgtccaaataagaaatgagagtaatagaaaactcagatttcattgtattataaatttaataaataagttacacaattgccgttcagtgcctgaaattgatttttctttttttgaggtcaaacttcaaccatgtatatgaaatgtaagagcaactttctaagcagaattaccctttctgatttccttgggttccttttggttctttaatctgtatgactaagagtgtggattggctgacattatgagatgcaattaatttacatgcttaagttaggactataccatcctgtttccatccattcttgatcacaagcatattacaaatgctgtgctggattatctttactattaagacatactgcagaaagccctgcaggtaaagaaaacaatctagggcttaccttagaggcaggaagaattgcatgttaagaaagctgcatacactctggctttttgctctttgagtttagctcaatgtcttcctaaactttggtgtgcaggaggtgactacgcagtatttaaaatctaatccatattatgtgtatagtatggatggtatagcaattttccaggtggatttttgacaatattttattttttactattcatgttgactttgaaaaataactacagggctagatttgattcaactgtccatggttagaatttttaaaaaagtttttgactctaatacaactgagttccatctacagaaagaatgcacatatggatacggctgtccagaagatcaaatatccttgtactgaagtatatctatatttagtcattattttataaaagtagtagaaaacaatagtggaatataatatgtggtctttggaagaatgagaaatcatccttacccattaaacacagacccaacacttaatgtatttccattttgatagtgacaagttttgggtttgggatgatgtgtcagccagggtcagttaacagacagaaaccacttgagtgactgtagcagaaaataatgtaacaagaggaattgggatctaggtattgaaaaattgacaaagagaagaggtagcaagtgcacaaagtagctaccgctcctagggctgggaagacaaaaggttagaattactaacacttagaacccttgaggaaggactctacaaagctgagctcaggtctgagtagggggctgctacgtggctggtgctaccctctctgggatagcaggaagggcccaatgggactgaggcccggacctctgccagccaggtggtgctggtatttctgcagcaggggcgatgaagctgattctctaagcttttgaaaaacaaaacacaagctaaattgaatagcttgttactaaaaagtgctgctgcaggcatgaagaagcacgtctagggaactgctaataaggacagtaagtgcatgggaagctagtgtgaatgagtaaatcctttgtccctcctccaggcttgcagtctccctctattgctccctacctttagattctgagagtcagtcagtaaagccagaagtacggtttgcagagtctttgcctcagcgttgcaaagtagggtttagaagggtgtgttggtatggctctgaggaagataaaatctctaaccagcatgagtgctaatatgtctaataagatatatggaaaataattattaagtatttgactgaatttcaaggattaaaaagcaatacttaaggcaacaaaaacatcttatatttccattaaagcataatttttcttacagctccttcacattggcaaaattagtttgccctcttgaatttttcaaagatgtgaattatggcaagtaataattgctgcctactattgaatatctggatgttgtagaactgccattgtatcatatttaacttatttttgagagtgttagatttcctctgatagaagatattttttacttttccaagattaatagtagaaatattgaacatcaaatcattttacagataatactgtcctaacattgcgtaagtatacaattattcatagactcagaaatcataattgtcttcacagaaagaaaccagttcagaatactttaagaactatttggaatgttagatttaaaatattctgtagccaaggtaaagcaagttagctaaaattccttttgtttctattgtttttagaactagcttcaaagagaaagaatttgataaatacttagtgtccaataggctctttcatacagttcaaagatgtagactgacactggcatctacagttcctagctgtacttactctggtattttttgccagctgccttcgtggtttctgcttcatacctgtttgtattcataaataactcaatctaagatttttagctttttaaaaagaattgcatacaatcatcatcagattacaggtttgaaagaaatcttagtttttttctttttcttttttttgagatggagttttgctgtcgttgcccaggctggagtgcgatggcgcaatatcggctcaccgcaacctccgccttctgggttcaagcgattctcctgcctcagcctcctgagtagctgggattacaggcatgcgtcaccacacctggctaattttgtatttgtagtagagatgaggtttctccatgttggtcaggctggtctcgaactcccgacctcaggtggtcttcccacctcggccgtctaaagtgctgggattacaggcgtgagccactgcgcctagcccagaaatcttagtctttttaactcagttttgagattctgccatatacctggcactgtagttaagagatggcatataaatgggaaaaataggtatttcaaaagcaatcaaaagcaattacaagactatatagtatgtcctaccacgggggtatgcatgggagcagaaggaagaagagacgaattttgcttggctagggttgtattggggttgaaattgatatcaactatagactagaaacttaaagggattttcatgccaacaagagtacaacaggccattcaagtccatctcttccaaacattgattaaacatcttttataggcagacaatcagttagttgctaagaagactaagctgaaaaaggcttttttttttttggccctgttggagctttcagcctattggctgattaaaaaaaaaaaaaaatgctgaggagtatgaagtcacaaaccaattgagttcaggaaccagtaagtagtttgacatgaccgtaatggaggttttgggatatgggcaattggcaaaaaattgaaaaggatgcgggaaaggtggactggggatacaatgtggatggatgattccttgctcaattgagatgaatgtgttcaaaaaaaccaggaagtttttttttatgttttgcatattagaaagttacatttggtggctatatgcagaatcgtgtatggggagagtacaggtgtggaggtcactcatgaggctaatgtctattcaaatgggagaagaggaaggtctgaaaggcaatcactattggaatacatgcaagtacatctagcattgttctgtctttctgaagatgtggaaatgaagctctctcagaattaaatgacaacatgccatggctgtttgttagagggaatggaagtagagattgaaggtcttgatttccagctgatcatcctttttatggtaccataccactcacccagcctgttgaactggaaaagattatgaacatcaggcattaacctaccaaagtaaagcaaaacaaaaacgctgaacttctccatatttttaaaaatatgtgacacatatatgtttattggaaattaaaatacagtaaaggctctttaactgtcattcaataaatattttttgaatgaacgacgatcacttgtcaataactggtattaaaaaagacaaatattaatggtgatctttattcaataatttcataaaatgggaacaaagtggtaatttgccagtaggatgaggagggcatagcagaggttgtctaaccttttggcaagggcaaagtcaaactggtgaataagcaacacaagctgtgatgagagtcatgtgccatatgtaaatggtgactctttcttcctccaatgctgtttatcaccacaggcttcccagcggcccaagaacagtctgccgcagtcactggcattaataaatgccatctctacctgaatgcccttcttttcaaatttttaccaaaaggaagatagtagactttcagttttccttctggctgtgagaggcatagggagaataacggtaacagatgcaggaataaaaaggcttgatacacatggatattatgtcatgagggattcaggagtttatattaatatacaaatattagttgttttttttttgtttgttttttgttttttgttttttttttgagacgtagtcttggtctgtcgcctaggctagagtgcagtggtgctgtctcaactcaatgcaacctccgcctcccgggttcaagcaactctcctgcctcagcctccccagtagctgggattacaggtacctgccactgtgcccggctaatttttgtgtttttaatagagatggggtttctccatctcggtcaggctggtctcgaactcctgacctcgtgatccacctgcctcagcctcccaaagtgttgggcttacaggcatgagccattgcacctggccccaatattacgatttatcctgccctacctcaccactcttttcatgattagagatggaaaaatttgatattatttaaaaatcagtaagattctatctaatcaaaccattggcagtataattcacaacttttttagagattttctaaagtaatacagatactgtagtattgtagttttgtagtatagctacaagaaaatcatactgtgctctgaaatgctatcttagtaacatattgtgttaatggattataatggtaatcaaaacctccatagagctacaggtttgaactctaacattctgtcgaagttaaagattaatcagtttaacaccatattatttttattatttttgagacgtagtctcactctgtcgcccaggctggggtgcagtggagcaatctcggctcactgcaagctccgcctcccaggttcatgccattctcctgccttagcctcccgagtagctgggactacaggcgcccgccactacacccggctaatttttgtctttttattagagagagatggggtttcaccgtgttagccaggatggtcttgatctcctgacctcgtgatccgccctcctcggcctcccaaagtgctgggattacaggcgtgagccaccgcgcccggcccattcctagtattttcaaatagaaatctgatgcctttattactgtaattagaggaatgcttatgtttcaggttgggttttggtaaagcccatgtggagaggagaatttgcatgaaagtagtttaattaaggaaatgttctcagggatggcaagtaggtgagcaagagaagtagaataggaatggggaagaaatcatgcaaggagcaatcgcaggcaaagtgccagcctcagtctggttctgcaggaaaacctgggcctaaactatgcttcagcttgttgcaacttgatacagaaggagctgggcttttgtattccagtagtcaccagtcattgccttaagactaccctaaggtgacataaacaccaaggcacttccggatctctgtttttgttggcaaagcagctttactagcctgaagacagtcatctaaagagatgtagatacagaagttttgagaagcaaagaccacaaaagccaaggaggtgggcacgcagaagtgttaatggaatcttagtggatctggataaaacacgattttttggctataacctctaaagggctaactttcagaagattacgtggacccaattaagcacttacctgaataattttgaaacatctctaattgtactatagctagagttaaaagaaaaaatattttctaatataaacaaaaagttcagaattatagcattattaaagaagcttttttcaaatgttagcattcctgcttcttgactttacatttttccggaacaaaatagttttccaaagagtatacttaatgacttgtgcagatgaattctaaatgataaccacagggctcttggacaagggatcatttaaattttgagttcttgtcagtcagacatatcaatccatatacatttccccaaccagggtgtcagaagtgtagtcaagtgagttttgtaatgatacttctttgtttacatctagctgcagaaacctcttaagactgattctgcatcagaataattgctagagggaaaagggaagctgtgattatgaaataacactgttatccactggcacccctttgtgtctatcttagttgaagctttgaggcacttctgtgtctattatttgattttaattggcaatggtattgattataaatcatttgacagaatataatttttatcttaaagtttaaatgtacctagaggctacaaagattcctgcgttcaatgaaaacattaaagtaatagtgtaagtagtttaaatgtgccccatttggcacagattagtgtcacctatggtacaactcagtcaaaaagtgaatgtagctgaaaactgaaactgttcaacagctccaaatttaagaaacacggaacattcactatgtgcaatagacaatgctagttttagtaggggattaaaaaaaaatatctttcagccaggggctcataaagtagtgaggaaacctacaacaacttcaagtcagataatgacaatatgtcattaagggacatgaacaaatgaccgagagaccgcaagatcaggagggactttttttggagttggttataaaggaatggcaaggcacatgggaatcaagaattcattcaaacagagccttgaagaaaggtgttggtggagtggaaggctagaacacaaaaatacaatctacagaataagaaagcactagggggcaactgtggttggagtacttacaagaacggtttaggaaaataactagttgtactacatagactaaattggataactgtcaagatttgaggattataggtgaagaaaccattttagagtttattataactgacattttgtatctagagacaacagggatatcagtattgatgtaattaaaggatgtggcaagaatgaggtgaaaataacttatgtcttagggctgaaaaattgagaggatggtggtatcattggatatggttagaaatagaaataagcaaaactatgatggggaagtgatttgtatttgggatatattgtctttgatgtattgatgggatatccaataatctccggaaaatatgtctggatctgaggagggaaatcagtgtgtgtttgataggtgtagcagtgagaaagtatcataggcaagataccacaactaaagaaaatggtttgggggtaatcaatatggagtttaagccatgggggcagatgatacggcaaaaggatattatacacagttaaaaaggaacccaaaaccaagtcttggagaattcacatttaaatacgtgcagatatagagaagccagcaaagaagtgttaggagaagtcacaggaaactgtaaagtgtctggtcacagaagcagcaagaaaaacagtttttaaggaggtgactacattgaccaaaggcagtgattgaattgaaatttacttggggtctgagaaaagaccattcggttttctggttgctttgactaattttaaagtaacaatttcagtggagtagtagaccataacctataaatgcattgatgtatttatttattcattcactcactaattcacttatccaatagtcattcatttattcttcggtgcttacaaccgggcctggcactggattaaagtgaaattagaagtagataaactggtagagatagccaaaacatatctccctacagaagggaaaagagcagaaaattatcatggaaacactttgcatagagtttctcacagcaggttgaaagtatcctaaggttatagcagtgtaggctggaggaaaaggagaaaatacagactaggcaggacaggcactggggaaattcaggtgtaactaagaagagactgagtgctgggagacagggtgtaatctgttaaatagaaacataggcaatagtaaatcagggaaccagaaagagttcaagagtcgatgaagagggacatgtatcaaggtctcgatcgagagggctgtgattcaaggcagagcctccattccagagggagcttaggatactcttctggttttctattactatgtaacaaaacaccccaagtacagtggcttaaaataacatctcttttatctttttatctgattttgtgaatcaggaattcagccgtgttcagcttattgatttttctactctgtgtggtgtcagttgacatcacttggcagaattcagctagtggatgtgctggtctggagggttcaagacagattcacttaatgcttaatgccattgtgagaatggctgaaaggctcagttcagcagggactgtcaaccagaggacttgtagatgtcttctacagcatggtggtttcagggtagtcagtttttatgcatggcatcttagggctcccagagtgagtattctaagaaacccataaagaggctaaaagttactaataatgatctaatcttggaagacctataacatcatattcgttgcattctacttggcagacaagttgctaagacaaatccgagctttaaggggagaattagatgctgcctcttgatgaaagaagtgtcaaataattttgtggccatttctagtccatcataactgctgtaaatttcctcctcctaccatggtattgagtgatgcatatctcacaggaggagagtgtgtcagtgactctagctgagaagggcagaagaaagaagatccttgcacaaacaagccaggcgagagagaaaactggcagtttttaggaaagaaaagagatgcatcttggcaggaaacaattgatggtagccagagttcaaggctcatgctgaccgttcattcttctacattttctaagctcaatctttgtatcaatagagaatatcagaaaacttccttggggaatcttactttggctctctgtaaaaatgaacttgtcgcaatgttctaccctcaacaatgggtgaacacagatttaagaaaaagacatgaaaagcttatctgttcttttgtgaaagtgccaaacactttctgttaaggttttcattgttgttaaagtgaaaatttggtatgacagctgctgtgagggatagacttaaggccttgcaactcaaattatggtctgcaatctaggagcaccagttgaggttttgttagaaatgtacattttcaggcgctatcctagacctcacacgagtctgcacttgactaacatcttcagaggtttcatgtgcaaacaaatgttgagaaactctgatctaagggatgtttcattattcagatcattgcaaaggacttgttaggttcctgttcttggtcttgtccctgtggacttcagattgaaaatcttacccttagcttaggctaagataaaattcctttccttttatttgatggcaattatacataacatgtcattacttgatttttattcgactttggagaagcaaagggttttggctaatttttagtaactattcttagcttttacaatgttatcattttatgtttgcattttttcctagccttatttagattctagacacagaataggggactgtgagtgctgagagtatccttagagaataaccactgtaacctacttcattttcatataagaaatgaatgctcagaaatgtgccttgatgtactcatggctacttaatcagtggtaaagctgagcctagaattatttcctcaaaattgtagtcctctgtacacttggatcagaattaacaggcaatgcatgtcataacgggctcatccaggtggttctaatatatactaaagtctgagaaacaggcctgagtgtagcttcaatgtctgctctctcactctaatgcctactgcctgccatatctagatgcctgtgtgtatgtgaacgaggagggaagagaattaaatcctagagatgttggtagccaattatctcaaaagcacatatttaggggtcagcttttaaaaggaggaggggggcttattcccctgacatttgagcaaagcaggaaagggtcggtgatgaaatgccatgtgtcctgaggacctacaggcctgggttatatgaccacttcaggaattgcatagcaatcaaaaagggaactaaaagaatcggaggctgggtaaaatcaggactaacaattgataaagcaattatgatcaacagtgagtgagagaaggagatttacctgatggtgaggtggtagccaccactaagattagtttaaataagattagccaccactaagagttttaaaatgaatgcatgaggcactggagtcttccattgcttctcttgccctccttgatgtcttctgacaggagccatagagatctttataaaacacaaactagatcatatctctcctacccaaagcctgtaaaagcatctctattacatttagtttaacatctctactgtggcttaccccttatccttctttgcccactaacttcatttagcatccacttcccctacttccctttgtgcatcttgtgcctgctatctgtaattcttccctttttataaaatctcctttttaagatcataccttgaattgtatctcttcagaaagggcttcctatagcttagccttaaaattctttttcagttgactttatttctaccttagcatgtaaaatgttgtcatctcttatttgttgttcatcttcttgagacagtaagctccagaaatgcagaaactaaatcattattcaatctaacctcatgtgatatctgtcacattgtagataatacttgaattttaaaaaggggacagaagtttcaagaacagtatactgtggtttaagtgagcaattcactgtgtgtgatccatggggtaggatggttcgaggtaggtgagaaagcatgaactggccatgaacatggacgcaaattgatcaaagtcattgcagcttagcaggtcaaaaagctgtgaggtcagagcatcagttaaaatgttcaatggtagttggtcatgatggcattagcaacctttaaatttaaagggacttaagtcacatccagaaatcggggatgacaagcctatagtcatcctctcttgaagtcttctgctgatacaagtaatcattcagtctgttggtctctatccccatgtcaccaccaacgatgactgggatccagtcaagcccttggatatcatgtcctctctcgtgtccttttcataccaatttaatcatgcctggagtgcccagaagcatactttcagtctcgcctgctttgacacctgactcattcatgccttaacctactgtgctagtgttatgatggggagggagggggtgactgagtggatttgacctcccaaaccatattctagcaagcaaggtacatcttaactctggaattcttctaaacctatatagggtttctgaaacttagtctcagagtgggagtggaatgatacagtactttgtcagaagctcataacaacgactgtgtcttaccataatccattacaatactgttcttgttccagttgaacagctggaagttgaaaaacatttcctttggaatgagtcaaactgtatcttacacaatcttcccagctcttatttacgagatagataatgtcattggtgctcaatatactaaggatttttcaatgcagggctctaatcttatcaatagattccagggaattactgagaaacacattatttgatccttgatgtctctttccttgtatttttatagtagcacgcttgaggaagtacacatatatagcttccaagaatgagggaaggcatcagttaatatgttaaaatagaaacctcccacttgatcttaagtatggggagggcgggggaaggagacaagccttaagcctgtttaccattgcaggtaaacaaacatgaagatcaaattctaagtaaggagagtttgttatggaatagctgagactgagggcataaagacaaccattcaaattattctagggtttcagaagacactgaagaaagaatagggagatgaactgttggtgaagcagagaggaaaaatagaccaagattaagagaaaaaaaacacgggaaaagattgcaggttggaggagggtgggtctatccaaggctgaggtcgaagcttacggcaaggatgcaggggaagaatgttttgttaatggtaaatagattgcaaaaattctgtagtttgcctgttcattctgatgatgggttttgtggttttttttttttttttttttttttttttttgctgtacagaagccttttagttctatctcagttgttaatttttagttttgttgcaattgactgatgtttttgtcaggaaatcaaaatctttgcctgtgcatatatcctgaatggtattgcttagattttcttacagggtttttatagttagtgggttttgtgtttaagtctttaatccatcttgagttaatttttgtataaggtgtaaggaaggtgtccagtttcagttttctgaatatggctagccagtcttcccagcaccatttattaaatagggaatcctttccccattgcttgtttttgtcaggtttgtcaaacatcagttggttgggtattagatgtgtgatcttatttccaagatgttggttctgttccattggtctatgtgtctgtttttctaccagtaccatgatgttttgggtagtatagtctgaagtcaggtagcattaggcttctagctttgttatttttgcttaggattgtcttggctatatgggctcctttttggttctgtatgaattttaaaacagttttctttttttctaattctgtgaataatgtcaatggtagataaatgggaatagcattgaatctataaattatacagtatggccattttcacagtattgattctatccatgagcatggaatgttcttccatttgtttgtgtcctcttagttccttgagcagtggtttgtagctctccttgaagaggtggtgcacttagcctgttagctgtattcctacttactttattctctttgtagccattgtaaatgggagttcatacatgatttggctctctgtctattgttgtaggaatgcttgtgatttttacacattgatttttgtatcctgagactttgctgaatttgcttgccagcttaaggagattttggggtgagacgatggagttttctagatacacagaagagacagtttgacttcctctcttcctatttatccttgatttctttctcttgcctgattgccctggccagaaattccaatacagtgttgaataggaatggtaagagagggcatccttgtcttgtgctggttttcaagggtttgtcataccaaaacctacagccagtttttgcccatctagtatgatattggctgtaggtttgtcataaatagctcttatttagagacatgttccatcaatacctaatctactgaaggtttttaacatgaaaggatgttgaattttatcaagacttttctgcgtctattcattcctttgcattcttttttctctaatcttgtctgctggtgttatttcagcaagataatcttcaagctctgaaattcattcttctgcttggtctatttggttattgatacttgcggtagcattgtgaagttcttgtgttttttcagctcccttgggtcatttatgttactctctagactgataattcttgttaacagctcctgtaatgttttatcatggctcttaacttctttgcattgggttagaccatgctcctttagctcagtaaagttcgttattactcatcttctgaagcctacttctgtcaattcagccgtctcagcctctgtccacttctgtgcccttgctggagaggagttgcaatcacttgcaggagaagaggcactctggctttttgagttttcagtgtttttgttttttgattctcatcttcatgagtttgtctagtttcaatcttggaggctgctgacctttggatggggttttaattgggattttttttgttgatgctgttgttgttgctttctgtttgcttttttaacaggtccctcttctatagggctgctgcagtttgttgggggttcgctccagaccccattcacctgggtcccttctgcacttggaaatgtcacctaaggaggctgcagaacagcaaagatggctgcctgctccttcctctagtatctctgtccctgagggtcactgaccagatgccagcaggaaccttcctgtataaggtgtctagcgactgctgttgggggtgggtctcacccagtcagggtgcacgggatccaggacccacttaaggaagcactctggctgccccttggtcgagggggtttgctgtcctgggggaatcccacttgtctgggcttcccggattctttagagccagcagggtaaagactaagtccgctgatctgcggagaccatggccacccctccccctaggggctcaggtccaggggaatcggagttctttccctaaacccctggctggagttactggaattcctgcaagcaggccctgcccagtgaggagggatgggtcagagtccggcctaatgaggcaatctggccattatttgccatagctggtgtgctgtactgcagggaattcctcctgggttcaaactgtccagtctccctcaaacctgaaggggaaaaatggtggactggagctgcagtgatggctgctgccctccctacaggagctcagtcctctcagtaagccggtagccaccgtgatggctgctgcccctccccacagcagctcagttctcttaggtggcagttctcttagatgccgcccctccccgggagagctcagtcatttgctgtaacaggcagctgcagtgatgatggccgcccccgcccccggaaactgagcagtcttaaggagtcgtctccatccgagtggcctgcgagaatctgcacagctgtgttttgagacccaaggccctgttggcatgggctcgcaagtgggatctcctgatctgcgggttgcacagatctgtggaaaaagaaagatttcccaggcagggtaggacaatcactcactacctcccttggctgggagtgggagcttcccttgtcgcgtttggctcccaggtgggccatggcaccaccctgcttttccttgcgctctcatgccaactgcctagtcagtcccagtgagagaacctggacacctctgttgctggtgcaggattcactcacggttttggttcttctcagtgggagcctctgactgcagctgttcctagttggtcatcttggcctctctccatatttttccatttttgatgtaactttaagtttttgcttaaattcccatattggatattacagtctaaaatcaagagaaggttaatgtggaccgagccattatttaaatttaaggttcaaagaggtaggtcattcagccaggtgagtgagcaccaatcttttaaaaagttggttaactatttgatagtttccacttttcaagctgataatgatattttaaaccaaggtcatttcaatttccttttggttcaatatttttggaaagttgctacctctttgaaataaaaatattttgtacaggattgtttacaattagcaaatgtttgctgataaagatgaatcactgaattaggtaccttttgtagttatgtaataaagctcttggtaaaaacttctatttaagcagttataactaatttttcctattgaaatgtcaggtacctattaagattttctcatagggcaattttaaattttttctttgagctttgtaagaaaaaaattgtcaactctactttcctttggctcttattcaactttattttaaaatgcatttttctagaaacactaactaaaggtgacagttttagttcacagggaactatttttgatttactatttttgttttggaaatgtctgaataaaccactggaaattatagcttataatgaagaaaacaagataaacacactttttatctaaagtgacagtaaaaatctagcaaatgggagaaaaataaagtcaacttttttttttttttaacttctccaattgaacgtcaaatgaacatattgggcaaggaatacaaccttagttgcatttacaatacagtggctacaacagaagagttaaacactaagtcttacgaaaggtagctttagaaatatttgaaagttggccgggtacggtggttcaggcctataatcccagcactttgggaggccgaggtgggcggatcacgaggtcaggagtttgagactggcctggccaatgtggtgaaaccctgtttctactaaaaaaatacaaaaatcagctgggcgtggtggcatgcgcctgtaatcccagctacttggaaggctgaggcaggagaatcgcttgacactgggagacggaggttgcagtgagctgagaccacaccactgcgctgcaggctgggcgaaagagtgaaactctgtccccccccccccacccccccacccccccccaaaaaaaagtgtgtgtatgtatatattaaggttgacactgtatttaaaaaatttctatgaaactgacaaaactattgcttcgttaattcttttttgcaagattgcattggaggaactgcatggaatataatgactgtgttcttttctaatagcacatgagtcagatctctagaaactgacttttgcccatattcaatttcagcagtaaaataatttctagcttgatatttctcataaaaactcctagggctcttttaaaaatattttataaatatctttataatgtggcttaatttttcagacatcttctgtgtagaaacaaatattcatatgtatgtacacatattagctattgctgtgtaataagccaccttgaaactcagtaggttaaaacaaccaacatactatttcaaatacatatgttagccaggaagttcttcaccttactgctaggattactcgtgtgtctctagttagctgggggttggctaaggggctttgctgatctcagctcagctctgcgaaatgtctggctgtctgctagtctgggaaaacttcatctgggacaactagggcaacttgactcggttccacttgtctcatcctcctgctgtctagctctgatgtgctcttacggtaaatgcagaggcatgaacaagagagcaaaagtgttcaagcccttttgaggtctacatttgggagaggaaatgccagcacttcaattgcactctgttggtcaaaatgagtcaaatgccaacccagatttaagaagcagggaaatagataccaacttttcatgagaagaacagcaatgctacattgcaaagggtatggattcaggaaaggatgaaatactaggcccaattttgtagttaacttaccatttacagcagttgctcctggacagtatggcttccttgccaaatatttttgcatgcaaataattggtaaacagtgccaatattggtttttcctaaacaatactatgttaaagtgtcagtcaaaatatgaattaaaaaatgcaaaacatggtaagagcttctcaaaattagttatgtttgaaagggtgaaaagaaaagacaagcagacatttgcctaagcagctttgggtggttaatcaagtcggtacactcggatggggtgtcttgtacctctctagtctcatgttccatccgtccacttacgttccaagaagtggcttatagttccttgaacagtgcgtctatttcatctgatccttagcatgtgaagtttcctctgcttgactttatcttccctttacacttctacctgttgataacctgttcaaccttgtatattctattcagggattttcactctgttgttctctccagtgaagatatcttttatttgtgccagcaccatacttacgacaaaaaaatcactattaataggattataacaccatgctataattatattcgcttaaatgtatatttccttcctaggctattacaaaagctgtgaaaacagtggcagtatgtttttatcttttatcttcccatttttcttaggacagtatgatgcataatactggttacatttagttgaatgactatccccctcgtctgacacataaggaaaataagccaagtgctatgtaatttatcagtgttcacacaactggcaaaatttaaattatagaactgtaataaataaaggcctatttgcttccagatactatattatttaacttacaactacaccgaatctcacatggaagactttcaagtaaggaactggcacttttcagtggatcttaagaaatggctacactaaatgccctagttaaactttttcttctgtttactactacctcatttaatccttatcaacttcaaggattatatttcttatattttgatttatatagccttaagtttttgttgaatgatatttcttctttagttaatataaaaagccacatttttcaaatacattagagtgaattatacattcgaacaatttgcagtgtgctctaaaatagtatttagtaattgagtctgctgagcacactggagtcctgaggagttaatgaaacccccgatgtcaaatgatataacaataggaatttgggactttgaagaattttcctaatgtatatatgtagaattatcactgttactatctttccattacaaatgggacctacaattaggagcaattttattggcaggctatataactgtatctgaccttttggaaatgatagaagaaagaaaagatatattaaactatctttgtagaaaagatgacgtaaaggctcaagtaaaactcacctaacccttgcccctgaatgtgatgatagtcaagcccagcttaaacagcagttgcaaagtaaagaatggtgtagagatctgtagatacactgcctaagtccaaattagtatctagcacttacttgctgtgtgaccttattcaagttacttatattgtgtctgtttcatcagttgtaaaatgggggtgactgtgaacattaaaacaacccacaaaaagtacacagaagtagcgctgacataaaccagtcgatgtgtgtaactcgcatctttctgatacatgaggtagagtcatataaaaattgtaatatttgacaatatttgacttcagaattggaaattgcataaagttggaccactaaaaggaaataaagcatagcagtgacagacgttctcctttaaatattttatcctctgtgacttttgacagaagatcttctttaaatattgtatcctatgtgacatttatcttttctgtgtttccaatttctttgatttggaacttcctgtagacagacccttacaggcatggaagaagaaagaatgaataaaccaaggatgacttcccagtaggtggaggatgggaataattaggaagaagctgtgtcttgtcacctatattgtccatacacaactgcaccgtagggtaattgagaaattataagaatggtaataaatacgttttacattcattaattaaagtcatctttggatgccctttgtccataatgtttcctctactagatctgaagcctaaatatcacttttcttctctgcaatttccctggaactgagtactcatagatgtttgtctagtgagccattccattatgtcatggtatatgtgtgtatttgtgtgtgtgtgtgtgtgtgtgtgtgtgtgtgtgtgtataaacacaatcttttttttttttttttgagacggagtctcactctgccacccaggctggagtgcagtggtgcaatcttggctcactgcaacctctgcctcccagattctctcccaccttagcctcccaagtagctgggacttcaggcgcgtgccaccatgcccagctaacttttgtatttttagtaaaggtggagtttcgccacgttggccaggctggtctcaaactcctggcttcaagtgatctgcccttctcggcctcccaaagtactggggttacaggcatgagccactgcgcctagcctatagatttcttttttgaagaatcagtgttatttgcatgctttgaaacaaagtgcttcatcttgccaaccttgtaccataccgtttctgtcagaaaagcaaccattgggatagattgtaattagccttcatttccatcactggctatctcaaatgcaaatcatgtatctatgtgaatcaaaagaaaaactggatttaggcctggtgcagtggctcatgcctgtaaatctcagcactttgggaggctgaggcaggtggatcacgaggtcaggaggtcgagaccagcctggctaacaaggtgaaaccccgtctctactaaaaatataaaaaaattagccaagcgtagtggctcgcgcctgtaatcccagctactagggacgcggaggcaggagaatcgcttgaacctgggaggcggaggttgcagtgagccaagatcacgccactacactccagccaaggtgacagagtctcaacaacaacaaaaaactgggtttaactttcagaatgttcaattttataggggatatttaaaggtggtgtaattagtataatcatggattgtaatcattccacaaattttaaaataactttgtgaattacattaatacataaaaatataagataaagcatttaccataattttattaatatttcctttagaatacctggtaaaatgaatgagtactgacctaacttaaagataaaacaattgagacctagctttagaagttagttttattacaaaacatgttaaggatagacctgatcagacaatgaatcatgctgactttttgttaagcatacttctgggttcataacatcccacttacatataacaacttgatttccattaacgatggtgtggtttcctatttaaagttcgaatgcacatctgtttgaatcatttctagtgtacttaatagagtaacatacatattgggttctagttaagatgctttataaaatgccaaataacattttatatctggagagattataaaaacttgtattttgtagctttgctcttgaacacttgctagctgcaaggaataacttggctttttcttgatgatcttcatagccagattttcgtgctttttttggtagagagaagtctctacaagtatttgacgctaaggaataatgaataaatacctactgattttatctgctaaggtccacaaaacattccagtattttgatatcactattaaagaagacgacggtgttccagtgatacatatgattccttacaatgacatcaccagagatagaaatatgaggcatgggaagtaacacgtaggccttcatttattttctgatatggacatccctggcattgatctccttggctcaaaggaaatttgcttccatgtctagggtggtgaatgtctttggcttatttctttggccctactctccacttttgtcttccttgggaggctgatgtctgtggactacatcaacaggctcctttgccctctggctactagttggatttggccaatgagagccttggtaagagagggagagaggaaagaaattccatcacccaatatcaaagctcctgtcagataatcttctcttctcagttctctctctatgtagtaactagaaaccactctccttcttttcattcttaggagtctaagagtagtagtgacacttctctattactagttccagtggtttcattataccttccctcatttttataaacagtcccttattaaactcttctcagattaccaaagtcctgctatggccatataaatttcaaaggagagtgtcattctccacctccaggtgataacatttaacaggagggaatgtaatttatttaatgtttttattgagcattttctatgctaggtaccataccagacatcttacatttattaacccttttaattctcatattttgaagttggtcccttctgttactttgaggccaacattacaaggaaagttatagacgatatggattatttggcttagaaagtttggaataaacgtgtgatagctaacacttacagaatatatcttacaaagtgccatactaagttcacttaaatctttgcaatatcaccacaacataggtaatgatacatgctctttctatagatgaaaagagtaaggcacggagaagttacttgcccaagatcacactgcagagctgggagttgaacccaaggcattctgggtgtacagtcaacattcttattcatggcatcataccattcccccgtgttttccaaagcatattttatcagtgtgacttttttctaaattccctctgcataaatctaatgtatttcagtcactagtattctaactcaaaatacaaaaccagcatttttctatctttaggtgactcctttcaagagaaaactaacctatgatgccacaagtcgtcatagtggccattcttgaggggagcttccacatagggggtgtgaggaagctgctagggtgttgatcatattctgtttcttaaatctcgatgctggtaatataaatatgttcggtttgtgacaattcattgagctgtacacttaagacgtgtactttcctctatgtatattattccgcaacagaatactgctttattatacaataccttttccaactcatatttaagaaaacaaaaaaaaaatcaactcggaaagcttcctatttacatgaaaatgggttgccttatttttctgggagctggtcagcagcgttcttcagtaagttttgaatccccagttttgcaattctttgtggtatttgcgatatttttggtgtttccaatgtctagggatttgtaattgcagaagtatcttgactttcttagcgacagttatgtccatggcttgtcctttttgtaatcagaaggtcatgctaaattatccctgtgttctttactttctactgaaacgtattgatccctttggattttcaggttaaaagaccaatacaactctgaagaatcagaaaccacttaaacaccttcacaaatgcatttcctttctcaaatttttttactttgatttgttccactttgatttggttcactttatttatgccacttgtcaacctacctatctgtgtttctttttgaacactgtttgtgcttccgtatttctttatttcatactaaaaaggatttggaaggaatactgtctcgtttttaggtcctttcgtgttgtggtttgggttaacaaagacaatatatatgcagatacattaaactgagtaatatcagatatccactcagttcacttgataagggaaatcttagtcataaaatgaactgaagacagagagctacagggtcgcctggcccaaggaggaattcatgttttgtgtgcttcacaaaatagttctcatacacttgaaaaggaagccattaaaggttgaattttaaagaaaaaatattgttcttaggatataaaatgccacctgcaacaaagacatggtgtatgttgaagatgaaaggggagaacaacaaaagaatacttaaaaatagtcaaaagaacaagaaaagggaggaaaaagcaagtttctaagtgcatcctctgtaccatctgcattcaccagttttagtaattgtatagggaataatgccttcccctattgacttgcactcccacagggatgccaaactaatagaaaacattttacatgtattctgcactttctaatataatatttttatattatcgaaaagactttaacttgtgtgtgtgtgtgtgtgtgtgtgtgtgtgtgtgtgtgtgtgtgtgtgtgagatcttgcttcgtcacaaaggccggagtgcagtggcacgatctcggctcactgcaacctccaccttcctagttctagcgattctcctgcctcagcctctcgagtagttgggatcacaggtgtgtgccaccacgcccagctaattcttgtatttttagtagagacatggtttgaccatgttggccaggctggtctcgaactcctgaccttaagtgagccacctgcctcagcgtcccaaagtgctaggattacaggtgtgagccactgcacctggccgagttaaacgtttttacacctagaatttggtcaaagaaagagatgcagacaaatagtgttaaaatgaaacataaaaatcaatctatatttattgagtgcatacgatttgccaaatctgtataacgttcctatgtgttgcagttgaacctcacgggagtgctctggagtaataatttgagccccattctaatagtgaataaattgtgcctcagaaaggctgtcacttgcccaagataacacagctagtgagtgagtgagagacctgagttcagaagttagctatttctgcttctgaaacttgggttacttttgctatagtatctataattctatagagtaagttgcaggcaggaaaattagaaccatccaagagaaatagtatgttagattttacctggggtattcatactacagggagaataaaactgagcaccgaaaggtctataaagttacaggctaaatgtagcacatttcactaaaaaaaaaaccacatcagaccgtgggaacgggggtgggggagatttttactcaaaagtacttaaaattacttttacataagtccaggtgtgatggctcatgcctgtaatcccagtactttgggaagctgagggaggcggatcacaaggtcaagagatggagacaagcctgaccaacatagtgaaaccccgtctctactaaaaatacaaaactgagctggacgtgatgacacatgcctgtagtcccagctacttgggaggctgaggcaggagaatcacttgaacctgggaggcggaggttgcagtgagccaagattgcgccactgcactccagcctggcaacagagcgagactctgtctcaaaaaataaatgataaataaatagttttacgttgaaacaagcatatattaaaagaagaaggcaaaatctctaggaatttttagcataaagtatatgctttcaaagaaatttaaaacctgcaggcactgtgtaatttatactgccagactccagggtaaattccttcaatttcatttcctggaaggatgctctggtagaatattctgagaagcactctattagagaatatggtgaatatgactaatagaaattggatttcaattgtgatactttaatatatcattgactctgtgagtttcgaaaataatacgatagcaggaactgtttctctatcacctcactgctttctctctctcggtgccccagctaggtgtacatggaatcccctacctgacctataatcctttactccctctccattttggttacctccagttttaaaagaagacttataaaagaccttggtctatgtatttaagtttggcccacaaagcaagattctgtctgcgtttttgacctttgcctagactttgtctccaaacccaaacgtagtccttgtgtcttggatgctatatgatcctgatggctttgggattcatgttttattctgtactccaagacttctctcacctttcccagtctctgctcctctttttgaataaacagcagtttatcacgcacatacttcttggtctgacagacttcaactttctaccctggattttttcttttcataaaaacaagtatctctgtcagttaacagttaactatattttcttcaacaatggacacattgcagtgcataagattattttttgatgagtttaaaagtcatgctttgctcagataagtgtgaaattttgctcctggccaaaggagggaaaaaaacacatcattttaatggcattgtataccttcattcaatttgaaaaacaaattattacactcaaaataccaaattattccaggttagatatgaagttcttggcagcactattagaaagtgtaaatttattttcttattactagagagctttccttaaagtttcattaaaatggcactgttttaagatttatgtgtatattatgtatagtaaagttgctttgttttagattaaatttatggatacatagtatatttagggggtaaatagatatattgatacaggcatgcgaagcataatcatatcagggtaagtgaagtatctgtcacctcaagaatgtatcctttctttgtgccacaaacattccacttcaaatttttttttttttttgagacgcagtcttgctctgtcacccagggtggagtgcagtgatgctatctgggctcattgcaagctccgcctcccgggttcacgccgttctcctgcctcagcctcccaagtagctgggactgcaggtgcccgccaccaagcccacctaattttttgtatttttagtagagacggggtttcactgtgttagccaggatggtctcgatctcctgacctcatgatccgcctgcctcggcctcccaaagtgttgggattacaggcgtgagccaccgtgcctggcccaaattcttaaatgtacagtaaattgttgactgtaatcaccctcttgtgttgccaaatagatcttactcattctaactagatttttgtacccactaaacattcccactcctcctgtccccaactacccatactacactctggtaaacatcattctactctctgtctccatgagttcaattgctttaatttttagttactgcatatgagtgagcccatgcaaagtttgtttttgtgcctggcttatttcacttaatacaatgtattccagttccatccacgttgttgcaaatgacagcgtctcatttttttttatgactgagtagtactccactacgtatatatgtaccacattttctttatccattcatttgttaatggatacttggattgcttccaaatcttggctattgtgaatagggttgcaataaacatgagggtgcagatatttctttgacaaactgatttcctttcttttgggtatatacccggcagtaggattgctggattatatggtagttctgttttcagtttttttgaagaacctcaaacagttcttcacagtggttctactactttacatccccaacaacgatgtaccaaggttcccttttccacacagccgcatcagcattgatgttgcctgtctgttggatataagccattttaactggggtgagatgatacctcattgtagttttgatttacatttctctgatcaatgatagtgacaaccttttcatattcctctttgacatttgtgtcatctcttgagaaatctctattcaaatttttgcccttctttcaatcagatgattatatatatttttttctatggagttgtttgagccccttatagattttggttattccttgtcaggtgggtagttggccagtattctctcctactctgtgtgttgtgtcttcactttgttgattgtattccttgctgtgtagaagctttttaacttgatgtctcatttgtgcatgtttgctttgattgcttgtgcttggtagggtattgctcaagaaatatttgcctagaccagtgtcttggagattttatcccaatgatttcttgtagtagtttcatagtttgaggccttagatttaagtctttgttccacttagattgatacttttgtatatggcgagagataagggtctaatttcattcttttgcatatccatatccagttttctcagcaccatttattgaaaagatggtcttttcttcagtgtatgttcttggcacctttgttaaaaatgagtttactttaggtctgtggagttgtgtctgggctctattctgttccattggtctatgtgtctgtttttatgccattagcatgcatttttggttagtatagctctgtagtataatttgaagtcaggtaatgggattcctagttttgtaaacaaggatcatttgattcttccttttcaatctggatgccctttgtttctttctttgatctagctaggacttgtagtaatatgttaaacaacagtagtgaaagtgggcatccttgttacagatcttagagaaaagtcttgtagtttttccccattcagtatgaaattagctgtgggtttctcatatgtggcttttactgtgttaaggtatgctgcttctatacccagttttgagagtttttatcatgaaggcatgttgaatttttatcaaatgctttttcagcatctattgaaatgatatggtttttgtccttcattctgttcatacgatctatcacattgattttttgcatatggtgacccatcttggcatccctaggacaaataccacttggttataacgaatgacctttttaatgttgtgttgaatttggtttgctagtattttgttgaggatttttgtatcagtatttgtcagagataatagcctgcagttttgttttctggatatctgtctggttttcgtgtcaggctaatattggcctcacagaatgagttcagaagtacttcctcctcctctttttcacaatagtttgagtattaggtgtttcaatgtttggtaacattcagcagtgaagccatcaggtctcgggcttttcttcactgggagactttttacatctttgatctcattacttgttgttggtctgttcgggttttgcatgtcttcatgacacaatctaattttgagtttggtttgctattctagttctttaagatgtattgtttctcttttttttttttttttgatacaagtgcttattgctgtaaactttgctagtactgatttatctgtagcccacaagttttagtatgctgtgtttacagttttgtttcaagaaattttataacttccttatgaatttcttcattgacccactgatcattcaagagaatatagattaattcccttgtgttttgtataattttcaaaattcctcattactgatttctcagttcattcaactgtggtcagataagatactttatatttcaattttttgaatttaaggcttgttttgtggcctaacatatggcccatccttgagaatcctccatgtggtgatgagaggaatgtacactctgcagctgttggttgaaatgttctgtaaatatttattaggtacatttagtctgtagtacagattaagttcaatgtttcctagttgactttttgcctgatgacgtccaaggctgaaagtggggtattgaggtttccagctctctttaggtctaataatgttgctttatatatctgggtgctccggtgttcggtacgtatatatttacaattggtatatcttattgctgaaatgattcctttattatatgttgatctttgtctcttcttacagtttgtcttgaaatatattttgtttgatgtaagaatagctactcctgttcttttttggttgctatcgacatggaatatctttttacatcccttaattttaagtctggctttgtaggtgaagcgtgtttcttgtaggcaacagattgagtcttggtgtttgttgttgttgttgttgtttgtttttttttttttttttctgtcactgtgttttgattggagagtttatttcatttatgttcagttttattattaagaacttattcctaccattttgttttctggttgttttgtggctttctcttccatcctgtcttcctttttagtgaaggcgatttttctctagtggcatgcttttatttcttgctttttaaattttgtgaatcttagtatatcttcttatttgaggctaccatgaggtttacaaacactataacccattatttcaaacagacaacactggttgcataaacaagaaagcaaagagaaaactaattaaaaactcaaacttcgtctcttttaatctttttgttgtttgtttatatctcattatactgtctatgtcttaaagttattagagttatttgttaactgaaagcttcctttttttactcttcttattcaagatatgagtagttcatacatcacaattacagtattacaatagtttgtgtttgtctgtacttactgagttttgtgccttcagatggtttttctggctagttaaggtcctcttctttccagttgataaattctctttagcatttcttgtagaacaggtctggtgttgatgaaatcccacagcttctgtcttggaaggtctttatctttcttgttggaaggagattttcactggatgcactatcctagcataaagggtcttttccttcagcactttaaatatggcatgacatgtcttagcctgtaagttttctgctgagaagcctgttactagttgttgttaagctttttggaatgtatcttttctcttgctgcttttaggatcctgtctttatccttgacttttgatgcttgccatctaggagccaaggcctgaagttgcatctttatgaatctatctggtgctctcttctattgtggcagagctggcacccaagccacaatacaaagtttgtcccattcttcctttcccatttcataagcagaggaatttttccccatggctaccactgcctcaggctcatggtgagtactgcctggctaccactgatgttcactcaaggcccaagagctttttagttaactaggagtaaacgctgcgaggcctgggtctctccgttctgtgcagtgggttctcctcaggccccaggtgagtccagaaatgccatccaggagccaaggcctgcaatcagagaacccaggagcttgcttgatggtctacctgactgtggttgagctagtacccaagctgcaagacaaagtccactctattgcctctcctttccaaaagcacaaggagtatatccccatggccaccacacttgggaatgcattgggccacacccaaagacagcatggctctgagtcttacccaagacttggtgaatactgcctggctactactgctgcttattcaggacccagggactctttagtcagcaggtgacgaattctaccaggactggattcttctcttcaaggtagcaagttcccttctggccctgggtgtatttaagaatgtcactcaggagccagggcctggaatggggggtctcaggactctgcctgatgccttatcctactgtggttgagcttgtgtccaagttgcaagacaatgtcatctttactgtccctatcctctcctcaagtggaagaagcagtctctctcaaagctgtcagctgcactgttaggggttagaggatggggtggtacaagcactggtgtcttactgggttgtgtgcccaccaagtcccctgacttcgagtccagcacgacaccaagacttgcccaggaattgcagtttttgtagcctagactccctttgaagtttatttaggaccccaaagtgcttgagctcacactggtgagactagctggaactcagcttctaactgctgagatgggtgatacctccctggatagggctggtctaaatgtgccctctatgtgcgcttgatgaattctgccctgtgttgcttcccactgtgacagggcagcactgggttccaatgcaacgtttcacaatcctgcgccctccctcctgcaagcacacagatcgtctacatgagacatggcctctgccaggggatgggggaggggtggtgttggcaattcgtaactgtctttcctaccatcttcagtgcctctttccttgatatgatattaaaatcaagtactgtgattgctcacttgatttttggtttttatgtaggtgcttgcttgtgtggctatctgttcagtttggtgtttctatagcagcggtagcgggaaagatgattgctggaaggttccatgtatttgaccgtcttgttctgcctccctcctagtaaagctattctttaaaaattctagcatgttagggttttgtgttatgttctttttcccatggaatttgaaaatggatctatttgagtagaatttcaaaagaataactcataatttttgtctaagtatatatgtggctggattcacaaagctgggcacacagggactggttggttgccgcaggtatcattgttccctgcttgaagtacccgggcatttacaggtcttgtcattgacatggctacctggttgtaggaatagtctaaatcctatgtttttaatcgtggaagtttaagggatgtcttttgcctggaaaccagggattttcttgacttgtgtgaaattcaaagtttatatgtgatccaaggagtgtatgtaaagagcacagtcacccaaaggctaatgttagacccatcacctgacgttttttggaaagtatttgttgatcccaaggcttgtgagagctcccactgttacatgttctttagtcctttctaatgcttctatgtaatagtaccttttaggaatattttctttgctggactctaagttctatagggtctgggcctatgtctgatgtactagcatatgattcagtacctagctcaggtttattcatgctcaatatgtctttgactgattaaattagggatttccagataggtgatgaaaaagctgggaattacctcatgaggggattgtagggttttaagcagaaaacgatttggtgaagtatgacaaaagaaagacaaatgttagaaagataatcaaatagtaggttataaaaggacaaggaagcaacataagattgaaagaacaagaacccagaattagacagatctgagccataattttggctttaccccattctagtttcatgacaaagagccacatactcatcttacatgagatacttagaggttaagtatgttactgctaatctcagaaatgccacaacggttatgaaatccactcatttaatagtgtgtctcatgagtatttacgttaaaaatgttaaatattatttattgactattatttttccttagtataattcctgagcaaagaactgagtaaaatagatgaaaagctctcacagggttgtttcaaacctaattaaacccgatattcctaaaatttgagttatccagtatgagaataggtcatagcatgcaaaatgtgtatgcacagcaagcatgttttgagtgataaggatgtcgaaccactctgactggtatattccaagaatggttaaactttatgtacccacccaggtagattgtggtcttttgcttctttgtgtatttacttttccctttacccgtaactgccttgatcatgcctgtattttttctctccttcatagaatctatattcatttcagtgaattaattagatcatttagggtataaatctcttactcttgctattcaaactaattcaaatagacttgacctatgataaaatttttaaattttttttgtcatttgaactttccttttttcatccgtcatcttcggcagattaattatgcacactaattatccttaaatatagctttagttttcaaaaggggataatcgtgaaaatgtatcattggaagtgtgctttgttaaattgagtgtattttttttaatttcagtttgggaagcagcatattgagaacctcttcagtgacctacaggatgggaggcgcctcctagacctcctcgaaggcctgacagggcaaaaactggtatgtgacttatttttaagaaagttaactttaaacttagtagaatttcagaccagaaactgacaacatagttttatgacatctagtagaatgactaggtactgattgaaacagcaatacctattccttagtaaagcaacctcgtatgattttcatttggcatactctaccgcctgcagaaaaagtaaaaatttcagtaatacaatttatattaatagatattattcagttttactacttggtatctatcttatcaaatatcttaatgaaggcttttatacataatgacttgagaaattatctttgtacttttgtgtatttttgaagttattttacaaggaacctgtatgagtttatacatgtgggatagcaaaataaggtacaggcattatagtgtaatacgtgatagcatatgtgatgaaaatatcacttcctcttgaactattatcttgtctaacttcagagcattcctgtgaagatacatgattgatatacatgattacagatcagtgaagtcatgttgatcaaggtcttacactggggggggaaagaactcaaattgaaatcccctgactgaaataatcgtcttagattgctattctaaaaagtagagtttaagcccccagtctatagtcataaataactgttctacctatcaaattctgctaaatcatagccttcgtctcttatctttgcccttcattacaactccccagcacatgcacatacacacacagacacacacagattttgtcatattatacaaactgaagctgtcgttcaaagtcagttagcaaaaatcctatctaccccagcctgcctcctgtaacacttaacgctaagccactcttttctcggtatatattgtcagatatctctgggtttttgcctgtattattttacttgcctgtatttctttttgtacttctgtctaccccaactgtctgccagaaaccttgatttcacctcagtaaagcttttcccaaattacctttgctaatttttccctcccaaattccacagaaggcccatttttgtcttgtttttagtgtatgtatgactgacatccctcctcaattaaattctgaagtcctatacagaagagacatacctatgctttcattttttatcttcagctatgtgagattaatactaaaacggatccatttttttcaagaagtctgaacttgtactaatagaagaacaacttgatgacatattgaaataataactttagtcaagggggaaaatcagatttaataccttatagctgaactgtttgctgggcgccaatttgaggtcatcatgtaaacttggtcttaatttcactagttagagatagatttgtgtgtaattcatctcctatgactgtgaacaatttacatatatatggatacgtagcatatgtacagaaatcagtgtgtctgtgtatctcgtttctcctgtattctgaagtcagtcctactttgttaccgaatacagaagtcccagtgtcttccaaatgttcgtgaaaaatctttcaaagattatggcttactcatcttgtcctggccctctgttaggaggctgttgtctcttcacttccaggtatctgcgtgatcacttctcctgtgttgcaatcctctggtcatttccctgactgagtcaatccatctatcacccaaagcaatttagtcagggttaacaaatttcatacataatgtttaagataatgaatttcagatcctttcgtaattcataagcatgatttgggtgtttatactcagatatgagataagcctttctctaaacttatgatgttggcacactacccatttgatataaagaaaaaaccactaatttcggcaaaattaaaaaatccacatgatttgcatttatgcatatacatacatagacgctaagacaaaatgaacctaattagtaatagcattaaagaaaaaaatatcaaacaaaatatccatgagattggccagtataaggtaagctagtggtagggaaaaatcaccaaacatttacacatggcagtgtagattacataatttcagatactgctactaacagaatccattcaccattgtttgtcctaatcacagatctgtcagccctggtctgaggattttgcctttctcataaagcagaatcacctctaacaaatgctcccgatcccagaactccaattcgctatgccttgtcttgaattctaatagtttctgtagagatatatcttctactcctaatgggaggcatgtatactatagaacagaaattttagtattctactcagaagcatctgcatttggattattggctcaggacatccccagggttaaaaggaaggtacttgccttacaatcataaaataagaaatactccccaaggagactctaataggggcagattttaagttcccacttcaggatcagaaactgcagctttttaaaagagtagactatgtttggttctaatacatatgcacatgtgtacatttaatgtttgaatatgatacaaaggaaaattttgctaaatcttgtgactatataattacataattgaaaggaaatatgtggctttggtctaactactaggcagagaactgatttgagtaattattttcaaaactttaaagtcctataattaccattaaacttgtatactgtcaatctatatatacacaagaagattggttatttgctgtttttctttcatgtattttttttttattttgatggaatcttactctgtcgcccaggctggagtcagcgacatgatcttggctcactgcaacctctgcctcctgggttcaagcaattttcctgcctcggcctcccaagtagctgagactacaggcatgttccatcatgcctggctaagttttgtatttttagtagacatggggtttcaccatgttggccaggctggtcttgagctcctgatctcaatgagccacctgcctcagcctccccaaatgtctggctgttgcttttttttttttttttttttttttaaatctaaagtcttatttttttcctctttttggtggaaagtgggagaaatatcagaatgtaaaccaacatcattctgacattcttggaggaaaatctaagaggtaaaaatggagattctggttcataaggttagccttaatgttttgtgaaatcaaaggaacaagatgtcaatactgtgttataaaggatatcaggcaagttaccttggagagtaagatggctttagcttaatttgggttgttcagcaggcagtgcaaatgataaggagttctagggtgaggaactacttgagaaagaccaggagctttgctggaaagtataggagttaaatgcaagacacagaaatatagatatttgtttggtgcatgcacaaggtagttagagaagaaggaaataaatttgcaagactggggctctacagacacagacaaaagtttgggtcctggctccaccaattattagttatatggtaatctatatattagatattttaacctgaggttcacttctgtacaatagggatgaaactaactgccttgcaaggcggggattaaaggtagtgcattcaaagtacttggcacatactacgaagtcaataatatttatgttggaccaactatgtgacaagcaccaatcttagtgctttatgcatatcgacacactgaattctgccagaaaccatatgtacaatggtttgagcaatatgaacaataagtagtgccctggacaaggtctggatcctgtgagacagcatgcttcatgtttgagtgagggctttgacctcaaatgcagagaagaaagtatgtcgaattctcttgtaaatcagagcagttgttattgagagcacatgttgtaacttgtgtatgcctcttgctaatattttcattaagtccatttttaacagatgagaaaactggtatacagggagattaaattttttatgtaggccagacagcacaaaaacagcagagctgacaattgaacccaggcagtcagctttgtagctcttgcccttaactgttacctataatcacccaaatgtttaggtgagaactttgcaagtggtttgcattggcagtgggcttacttcaggaacgtcattgttgatggtatgaaggaaggatgaaaaaaatggtgagtgagtggagaagggaaagaggttagatttctctgggcaatagctaataagggcttgtagtaaggtaaaagaaatgaaaatgagagtaaataaaacaggttatcataatggtagaatttctaaaactctacaacttaataaatgagttaatttgtatattacaatgaactatgcagatgttggtttaaaaattacaggataagatacaacttttgggattgagaataaaattagggaaccaaagtgattgaggtttagagcttcagtgacaaggacaattaaggtaatcttcacagaaaaggtttcctttaaccctatttggcattatataattttgctagagtcaaatctcctttagatttttctaaaaagtttgggaattgtttttctatcttactagaaaatgtttttatgcatgctgatgtttctgtcattggtggtcatgcagtaatccccaactgggctatagaatgaagaaacaatcataccaaaataggctttgtaaagaaaaagtgttgccattcttagagtggttggtttatgctaaaaacgtaccaggccaaggacaattagcgcaaagtatttagattcattatattaatgcctcacaggctctgttcgtttacaatattcaagcttaatagtgaaattataaatggtttcatttctagtagattgtcggtctctctgctggtcagtgaacactcttttgttttgttctcagccaaaagaaaaaggatccacaagagttcatgccctgaacaatgtcaacaaggcactgcgggttttgcagaacaataatgtaagtagtaccctggacaaggtctggatgctgtgacacagcatgcttcatgtttgagtgagggctttggccccaaatgcagagaaagtatttcaaattctcttgtaaatcagaccagttcttactgagagcacatgttgtaattcgtgtatgcctgattgtggctaatataattcaggaagcaaatgcatgctgccacagagggaagggaaaagacatagacctgacctgataggctgctccctgttttcagattttacttcatgaagctgtgtttggtggacaaagtcctgcagtcaactcggtttcttttcttactttgcttttctttttcttttttcttttcttttcttttcttttctttttttttttttttgagatggagtctcgctcttctgtcccaggctggagtgcagtggcgtgatctcggctcactgcaaactctgccttccaggtttaagctattctcctgtctcagcctcccgagtagctgggattacaggcacatgccactatggccagctaatttttgtatttttagtagagacagggtttcaccatgttggccaaggctagtctcgaactcctgacctcaggtgatccacctgcctcagcctcccgaagtgctgagattacaggcgtgagccaccgtgcccggtgaactctgtttcttacggcagtgttttgtgcaacaaacggatttttctataccaaatatttatgtactaaatgtgttcaaacctgataatgatgtttgtttaaatcaagccaacacttattaaacgctgtctccaagcatataaattatacagaaacatcactatttttacttggggtatgaatggcagatttgtttttttggtttagatttaactggattaaaatacgtgtgttgcattagaagaagtaaacagtcacagctaaaccaagtaggcaggtcagaggaattctaatctcctctgaaccacttggtgactcttcccctgtgtcatggcattggaggcagccttcctttcttattaacatcctaaaatctgtctaatcgaccaatacatttcaccaggcacttagtagctccctaattacattacctctctctttcaaagataaactcaagtacattgagtacgttgatcacttactcttaaaataaccataagcagggatagattaataataacatgtactcccccaaatgttgctcagcttatctggcagggagatgacattacataagatatggaaatggaaactgtgcagcaattaattggctgattttatgaattcagggtcattgtcacctttaacctatgaaagttattttacagagatgtttgtcttaggaagaaattaactagatttttcactccgcagccagaataatctatgagctgattttcttgtttattagtccgatggactctttggaaatatcagtgtcattgacattatgagaattgttaacaatattaaagttacacaaagaaaatgtctttgaaatatcaaaatatcatattctgtttcaaaatgtagcagtgaagaaaagagcggaacacagaattattagatttaatttatttgtagcttgactgtccccagcaagaaaatgtcatttaaaaaaacaaactttgggatatcctgtaaaactcaatcctgcataaagaaaatgcggtacaggtcgggcgcggtgctcatgcctgtaatcccagcactgtgggaggccgaggctggcagatcaccagaggtcaggagttcgagaccagcctggccaccatggcgaaaccccgtctctactaaaaaatacaaaaattagctgagtatgctggtgcatgcctgtaatcccagctactcgggaggctgaggtaggagaattgcttgaacccagaggctgaggttgcagtgagtggagatcgtgccactgcactccagcctgggaggcagagcgagattccatatcaaaaaaaaaaataataataatttggtacatatacagcatgaaatacaatactatgcagccacagaaaagaattagatcatgtcctttgcagcaacatggatgagtctggaggtcattatcctaagtaaactaacacagaaacagaaaaccgaataacacatattctcaataagtacgagctaaacactgaatgcacacgaacacaagggaacaaagagccagcagcagctagtgctggggaactttgagactcctacgtgataaatcatgaaagggtgtatggggggggtcttacttgcaagtatgttttgggaggttttttgggcacacatgctctggttgtacatgctagcacacataccacatctcattggcatctaaaatctccacccaggggtgtgtgggtttttttgtttgtttgtttgtttacactattacaatgagcaaaagaatagggcaagtttttggaggagtgtgtgcatgcttgtcagtggggaaaatccctagcgtggttatctctggcgagggcctgagaagtcccctttggggctagaggagcccaaccacaaggctagacataatcagtgtggacagtgtgtgtattcattgtccgtttcgctgattgtcaacaggcagcactgactcagtgaaacagcatcttcaggacttcttttctcaatggggctcccttgcctgctcatttctggctatctgcctactccaagggaaccagaaaaatcctggcaataaaacatatagaaggaaatttatatgactttgggataggcaagtatttatgatacctgaatccaaagcatgtttcaaaaagagaaaagttaacttggacttcatcaaaattgagttattgctatattctggatatgagccctttgttttgagttgcaaatgtattttccttttctgtggattacctttttactcacttcaatggttaatattaataaaaacaagttctccacttggatatagtttattctttaaaactttatatttttatgacctgttgaagaaatactggcctacccaaagccattatgatactatattaggttattatctatagaaccattatcgttttaccattttgtttttggatctgttttacctgaaattgattattgcatatggtgtgaggaataggttaagactcagtatttattttatttgaagtctaattaacacaccatttattaaaaataatgcttcctcattgcttcacagtactaagtgtgtcattaaaaatttgtccgtacatatgtgggtctgtttttgcacttcaattctcttgcattgttctctctctctctacacacacaaatatcatgtaatgtggagtaatgtagttttataatacagcctagtatctggtgaactaggttctcccactttgttcgagattttattggttattggccctttctatttttgtatttgttttgtaatcttttccatttacatgtacattcattttaagtatgattaacattgagttaaatctatagagaataactgacacatttacatatggagtatcccagtcttctgtttttcttgattttttttttaaattttaggttttctagaatgagaaactgaaattgaacaggaacacaaaaggtgttcacaaattcaagaatcatatttaagaaatgtttaacctcagcagtaacttgaggaaatttaaattagagctgtaatgagataccagtacaaaattaccaaaatgactgaactagactactaatgccaaatgttgatgaggacatggatcaactggaaatctcacaattaacttctggaaatataattcaggcaactaattaaagagttgggcatgatctactaaatgtgaaaatgcacatttcttaccacccagcaattctattgtagacatacaagttacagaaatacatttcccagtttgccaaaaacacatatatatgtgagaatgttcatagcagtttcatttgtgatagcccaaactggaagtgactatgatacattctcatgatgggatattacagagcaatgaaaatgaccaaatgatagctacacacaatatacaagatgaagtcgttaaaatgtatttgagtgaaataaatcagacaaattatacctactatgatttctttcaattaaatttcaaaaacgggcaaaatgtttccatgggtttaaaattgaagagagtggttaacttttggaaggagtaagtcagtaaaacgcataagagaatcttctgcggtgctcactgttccatgttttgacctgatagctgttacacatgtgtatttactgtaagaaaacgcatcaagttgtacacttatgtatatttttctatatgcatattccacttcaattaaaagaggaacttatgaagggaacttaaaacctccgaaactccacgggccatatatagaaatctgatcatagaccccatgttttctaatgaaattattaaatgaatataagtgaatataaaattagaatatgatgtcatatgaatctcttcagggaaggccacatttcttacagaaaatatagaacctcctaatgttttagtagggaaaaggccccaaaataatggcttaaatttgagaaggagttgttcaaaagcagatattaacaatgctttcatctgagctagagctttaatggggagctgcataagatgctggcctatgcgttagaggacaaaacctcaagacattctcatgcagaaaccaaacttggaacaaaggaacctttaccttagcctgtggctgaacaataacacatggattttcaaaagtaaatctaggctgggcgcggtggctcatgcctgtaataccagcactttgggtggtccaggcgggtggatcatgatgtcaagaaattgagaccatcctggccaacatggtgaaaccccatctctactaaaaacacaaaaattagctgagcgtggtggtgtgcatctgtagtcccagctactcatgaggctgaggcaggagaatcacgtgaacctgggagcagaggttgcagtgagtggagatcgtgccactgcactccagcctggccacagagtgaaaaaaaaaaaatgcattatcttataattctccattttgtcataagtataaacaaaaatggaaaacatccataagtacaactttagtttgcttattaggaagaataaatcaaaatgctcaagcaggattttttttctaaagttgagcttgggtgtgttctatatcaataagcctgtgcaggatataaataatcacattgaagaagtcctatccaaatttccttttaaaattcacaggtatataagttgattgattggtgtcagagcaaacacaaccctttgtgtgtcagagattacagccacatggtaggcaatatgaagcatatatacttaggaacagttaagtgaataaaaaagagatacatagaataagaggtctgagaagaccttttggttcagttcctatatgagcagagacctggagaaagggagtgagccttggaattgtctataggaaggtgggttaggcacggtaataaagaccttaaggtgaaaaagcatttggaatgaggcctcagcaagtggagtagagtgagtttagagataaaggaaacatagcagagataggggagcagagaggtagtaaggtgggggtgagaagaagaaagcatggtgagccattgttggcatttggactcaggtctaaatgagatgacaatgactaaaaaaacactactagaaattaaatgggtcataagtcaggttattttaaaaatcagtaatagttccaagtctttgctattgtgaatagtgccacaatgaacagatgtgtgcatgtgtcttcatagtagaatgatttataatcctttggatatatacccagtaacaggattgctgggtcaaatggtatttctagttccagatccttgaggaatcaccacactgtcttccacaatggttgaactaatttacattcccaccaacagtgtaaaagcattcctatttctccatattctctccagcatcttttgctgactttttaatgattgccattctaactgttgttaaatggtatctcattgtggttttgatttgcatttttctaatgacaagtgataagcattttttcgtatgtatgttggccaaatgtccatcagtgatagactggattaagaaaatgtggtacatatacaccatggaatactatgcagccataaaaaaagaatgagttcatgtcctttgcagggacatggatgaagctggaaaccatcattctcagcaaactaacacaagaacagaaaaccaaacaccgcatgttctgactcataagtggtagctgaacaatgagaacatatggacattaggaggggaacgtcacacaccatggcctgtcagagggtggggggctaggggagggatagaattaggagaaatacctaatgtaggtgacgggtctatgggtacagcaaaccactatcgcaggtgtataactatgtaacaaacctgcacatgtaccccagaacttaaagaataataaaaaatataaaacaggaaaaatcagacaaaatgaaaaatcagtgatagaatactaacaaacttagagtgtcattttattcaagaaagttacagtcaataacgaaaacgtatcgcacagtagaaatgctgctaaatccatgaagaaaaattgatggaaatatatttttagagccattaattcaccactgtcaagtttatgacatatttaacagcaaaagattgagagtacaaataactgtaggtttaatagtgattttctgtatctcaacactaaagcatagtagatacttctataaaatatgagcattatcaataaatctccctatgaagttggatgtgcaagaagagcaatagtttaaaaatttcagttacattaactaaattcaagtctgaactctcaacaaggcattcagaaaatcgtatgtctgtcattattgggaatgctctcccctgagcctatggaatggccagagctcagtagatccacatggtgtctttcatagggcaaaagcattttcattttcagttcattgaggcaaccaagtgatacattcactatacaattttaaggtatcttgtgaagtcaagtgtattaactgtcctgatattaaacacgtggcatacagaaaaagttgaagagagtgtaatcaggggaatatttatagaaacgtggggaggattaaaggaagaaactatggtgaagaatgcagggattcacatgagttaataacctttactacatctaaacctaagcagtcaaggggagagggctattaatttgataaaatccctcatgttgggagagcgccactggacacaactgtgaactgagcccctaggtatctaaagaatgctgttagtttcaaatcattgcctggtgaagttgagagaagtgataccttagtctctccatagaatcctccagtgttttgccagtgccgctccttagtttagtctaaccagaagtccaaggttaagagattccaggtgatgtagtcatcacatacaaagaagaggtgaagaagtttggtgggttagtgaagtaggagtggaaaacggtataatcggcattccaggtatctagttctgttttgtttctgtgcgaaatgaggacttgagaatctgcatgccgagaactctgatgttggctagggcccagtcttgttggatgcatcaggaagccagtcacctttgaggccataccacttctatttgatgacagagagtagacgtggtttctggctaatttggggactaaggactccttcctattcttctggagacaaccagagccagaaaagaaagacacgctgagagtcacttcggatatctgctcttcgtcgtaaacttgttaaaggcttaggaaaatagtaaaaaaaatttcctgccacatacacaaattataaacgggcaatatatttgaatgcagtgaaaatgtcattaaatacacacaaactttcaaaattcatgttatttaataacagtagaaactaataatatacttataaattaagtttgattaaggtttgttaaaccaagagtataaaactacatttgtgaaggaaaaagcattccatatgaaaacccatgagaaatggctcaggctgtactgagagtttgaatttttgtctttgattttgatcttcattaaaaagataaattgaatcaagctttcaaataaaaatgttacaaaaatgctttaaggaaagcaggaactaaagataaagaaatagaagaaacactagataaaatatacagctagttccttataatatgaaatagattaatatcttatgaatgtgatccagacaaggagggagaaaaacaaatgtatgcagtttaaaaatggaagggaaatattaagtatgagatatagaaaccaaaaacgggttttacacagaaatacatatatgtttattataaaaaatgaagttgaggccgagcgtggtggctcacacctgtaatcccagcactttgggaggctggggcgggcagatcacctgaggtcaggagttcgagaccatcctggccaacatggcaaaaccccgtctctactaaaaaaaaaaaaattagacgggtgtggtggctggcgcctgtaattccagctactggggaggctgaggcatgagaatcacttgaacccatgaggcggaggttgcactgagaggtgatcataccactgcactctagtctgggggatcgagcaagacttgtctccaaaaaaaaaaatttttttttgaataccagtgataagtttgtccacacaccaagaaattgataattgctaatagaaaatcatatgaacagcctcctaattctataaacctatgaaaagaaaccctggtttaaaaaaatcactcaaaatttagccctctgatttttaaaggaatattagaagtgtcttttcaaaatgatactttttggtaatttctggatcattaagtcaaggtcattttgtcttctctcttttccttagggtctcctccattttagcctgtccctctgccataaatcactagttctagcatattctgtagttctaaactagctcctcagtttaaccctgttcctcagtttctttcctttccctgtcctggcgtttaacctgttatcctcacttgaatgccactcagcttatatctgtagagctcagacactacgtctgtgttccaatttgcattctttgtggtggctgttttagcatgaagttatccctgctgtcaataatgtattttggaaagccacttattgagaagaaagtacttctaagtgcagtgataactttattgcggtatttgctgagagcaaagctcatttgtaatagttggttgtgattttaaaaagcgaacaaaatacaaaatcctgagaaatgggagactatgctactaagtggttattcttgtctctacatcagctctaggtaaaaatgtatccacagcttctttttatttacaagtttttgaaggtaaagcaaatcccagctaggatgaaacatctcttatacagccattctattatttctttgccctgtcccacttttgtttgtaagtagtgcctttcattaggcattttaaattcagttctacacttaactctattctctcaaagatatttaatgggtaatttaaactttccttggatataactaagttctaatcagtgagtattctctattagatatttgcacttttaataattttgtgtctagtttaatgattaattttttgtctggtaaaggaacttagaaattacaaatttgatagagatttaactgtggtgctttaaactaccccccgctccccaagatgtattatgatctgtcttcctttctccaagcttgtgtcctcgtcttccctcttatgatttccttgcttacattttatgaattccgatcccttttataaagattcatacaaaaggtatagtgttgaaatataccctaggaacattaccaagacttcgctgacttaatataatttaatattaactgacacagttgtagatctaataattatgttcattgtaccagctcatcaattgtctatcacaaggtggtaagtttttaccaagtaacttcaaatctacaatgtgggatactacaaagcaaatagtcattgctatacattaaatcacaaatccaaggtgagtatttaaaaagcctagggtggaaattcagatgacagctatgttcaaatattcacttaaccccatcattgaaaatagtcactgaattagattgaatggttgtcagatgtcactgatctgaaaaatgatatactgttcacatgctggcatataatgttagataaagaggattctaaaatgttctttaaaactagtattttatgtgtcctttaagtattcagaaacttaaatagccatataatacatattttggagcatgtcagaatatatttgactataaactacttctatttattactcataaaatctagtatttaagtacaaattccaaatttaatttgttagacaagtatttcttacacaaaattgtcagtccacacaataggcctgtaaaatatttgcactttatatgtattaattctcaagtttgcagaagaggtagatcttgttaactctgtaacttatcaactatagggtctttgccaaatgattccgtgactttgactcactttatcatctgcgaaatgcattaatagtaaatgttcacttctttcaaaatacttgttatggaagatacaaatatacaaacataatctcgtattcattaaactcacattcagttgcaaggtaatataactactcttaaattgcagcatgttctcatttaaaataattttctgggtgagttgtttattcttcccatcccccttagtatacctcttgctttaagggaaattagtattgacacatttcttgtatattcaacttcaaattgagatagccagttacctattatgttcacatatggaggtctgctgggataataattatataactataaatagtactgtttaaaaatatttcttataatgtcactcaagtatcttttaagatttttattgtagctattgcttttttttttttttttttacttgaaattagtatacgtgacttgagcttaaaaagttggggctatatgggttgatttttgtcgttaaagttacatcctatattgccagataaaagatacgtaattacaaaaattcaaattaaataatatactgaaagtatatatatctttcatactaaattgtgaaagtattgaggacagtgtccatttactcaggcaatgccctctaatatatattctatataaggaattttgttgagtttagttaaaagagctactttcccaaaaagtttagtttgcattttattaatacgttcaaccagattacctgtatcaaaacttctattttgataaatttgttttaatgtctttcatgccattaaatgttcatattttcttaggattatgagacacttgtattaactgcctcaattctttattgtcaaagaggcagtatataaacaaatgaaaacatgactccattaaaaataattctcctgcaatgtatcagagtgatcataaacatatctgaaatatagaggaaatttaacatttcacttgtccataagcaatttgttgaaagtctattttttaaatttattcttaacattctatgcgtggcatatagtgagtggtcaaaaatagttaaagaatgactaaatatgtaaaacttaatcattgaaggtagagatagtatctttgtagtgagtacccagaattaaatcttgtaatatagttgaggtcaaaatgtgcttcaaaaattatctaatgtaaatttctatatctgaatcaaaaataattcttgaaatacggagataaggaagggaataaaaagctgtcattggaaatccaggtccacagtggcaatatggcccaccgtttaggttgtatatatcgacgtatttatgatttaataagaaaaagattcaatacatgcatctctcaatggaagaaaataggtatgatttatgcccataagtcttgaaattttaaacagtgtaaatcttaaatgtggtgtaaaagcacatgctgcagggcaatgaaactactttgcctttcctgtattttttatctttttaaaatgcattatatttagaaggattgtatgaatacttgagaagtttctcttgaatatggagaagtctttagcttggctacatgatggcagacatcttataaaagacatttaacatgtttaaaaagcaaattctgtttatctagaatgttggaaggaacttctcggtttatatatattttatgagaacgaaatgaaatgaaaagaaatgaaagaaccaaatagatggtggaagtacatgcttgaggtttcagtgtcaggaaggatatttacataataattttcaatgcatgggatttcccttttagttattgtttaagattctgtttaaggaaatcaactcaaacttttaaggatatttcagggttcctttcagaatctttttgtgaaattattttataatagtttgtaccatttcatatctagttaaaatcaccaagactgagtgaaaaggtagcttacccttatccccctcccttagctaattttaaaaatgcttgtattttacactgcatatgagggaacaaaagtgactccttcttaggacaaatatcaaactctgaaatgatctgggagaaccaattcctttgaaacaaatgtgagaaacgacctgctttagtctaatttcaattggctgaatgacgcaggacgtgttttcattagagcctgtagctctgaaatgtccttgtcactggttgtctaaaaaggcaagaagaggcagacaccatatattataaagatgatggttcccctgtgaatgagatataactttctgcaacttccaagttaaaaccgcaaatgcttaaatgatacacaaaactctaaacatccatctctctctgcatctaacaaaaataaaattgtatgaaaaaattcattaaagctttgtcagaactttgtcacctgtctttttctctctctcatacacaaaccacacatcacacacacacacacacacacacacacacacacacacacacacacacacgtaaatatcttacaggaatgtaactcttagttttattcatcattttcccttctctctctccttctgctctgccctaagaacttccattttcattatttgacttggttattgaaattattttcaagttacatgcccctcattctgacgtcttatttactattttctgtttgatgaaccctagtctgctattcttctttctgtaaagcaaatcaaaaataacactaacttgttcctgtcaataatctttcagaaaaccatcatatttcaggtttactttcatcttaagtttttcttaagtattcttaaatcttgaatatatcaatataataagtataaatccttttactgtaaaccatcatgggatatctaatcttagcttgaataaaatattgacgatggtagaaattacatccatgttcctgaaggaaagtgggataaaagaaaacagcgaggttttttgcctgtctcgaacaagcaaatgacgagaattgttcctcatagcccagtcatttaggaggtagagtacctggaagtaaatgctccctgaaatgattatatattaatcttagaattactaaatatatattgttatacaaaattatgtattgtaagtactagtctggcgatagaagagggacccccttaagttcttgtcctatgcctttaaaatagacagcaggagactactccatactaaagaataatttaatgtattaggttttctatgtgcaattcttacagactgcttattgtaacttgaggtgtttctaaagagttcacattttaatattctactggagtcacaataagtttccattatgtcaaagcaaaccatggaggttttctatcctccaaaattacatttgaataaagcaacttccgaagataacagtgtaaaactctgagacagcatcccatgttactttatgagtaaaatcttaggcctgttgacaggaactacaaaagccaattgtgctgcgtagtttaacttatttctgcaaaaactcaaggcatgttattacattttcacacagaatatcaattttcacacctattttggtatcagatgttttcattgtgcaaaacaggaaagcagaactttgggtaaccacagtgaccctactatttaatttccaaccatagagtgcttgtcacaacactgatacacacagtaggctcgtacattaacatacatgtcatattaatgttttctgttttgcttagtagacagatgtaatcattcacttcacacagattttaaaaggttttaatatttttaccattcagttatttagcaattagactgataattcttgaaagacataattctggaatgtgtattagaaaaaaaaacataaaagagaagttactgtatggcagggtgatgattatttaagaggaaatagtactgaattcagaaaaatgttatgacttacagctaatagtaagaaatacagcattataagagcaacaagcttatgagaattcatggccaaaacagaccagaccgtcaatgtgaggcattgaagagtaatataaatgccatgaacaataccctttcaggcatgacaaatacctccctcctctagagtcttcatggttatcaattagcatttcttacactccttggtagtttgaagaagacatgtacaagagacaaaacacaaccaaaataaataataatccttgtctgtatcatggtgtgaaatgtttattaacttggagagagagcctcttaaagctttttgtggagaattcactagatgtaattaatgaaatatcttctatccagacatagttttaaatcagaccttgtggaagcttcatttatctttgatactctgtttccctcttggtaaaatgcacataaatgtaaaatgttcatgaactcttggtaaaatttatatagctcatacatactctaatgatgtaggcatagtgaaatctgtattcagagagaactgtatagccataagatttttaaaagatggaaataaaagaagtatgcatcttaagaaattgtaaaaatagaaacaaaaataaaaattgtattcaacgtagaaaattgaataagaataatccattcaaaagtgagctcttgaaaagattaacaaaataggtaaacctatcccagtcataacaaagaaaacttagaataaaaactagacgagataaatgagaaaagacgcatgacagcagatacagaagaaatgaagtggaaactaaaagcaattttataacaattttgcaaaattctggaaaacttgattttctcgtacaatacaaatcactaaaattgagataagaataagtggaaaattagactgattacttcagaaaacatttagtaggttattaaaggtgtactgttgaagagtgtagtaggattctttacaaatgaatttaacgtaacccttaaagaataatttatatactttaagctattccaaagcatatgaaaagaaaaaaactccacaattccttttgtgatgtcaggttaacctttgtacttaacagtcaaaaagcaaagatcataaatctgtaagacagttttacttttgaatgaaatacaaaattttgttgaattataagaaatataatcacattttgcaagtggtaagcattctacaaatgttatctcttatttaccaagagctcttaaaattcaagaaggaaaagaaaactaccatatagaaattaatgagcaaaacatattaacagacaattcacacatggaattgtaataggtcagtgatacaaaaatatattcaaatgcacaaggaatcatggaaataaaagttaacaaagtgatgtatttgatcatacaaacaaaactaaaagaatcaaaaacaaaacaaaaatttcctggtgagagaagagcctattcttatacattctggttaaaatatgtaattctaaattgtttctaggaaggcaggtggaaacacctactaaaattacatatatatgtgtatatatgtgtgtgtatgtatatatgtatatagatgtatacatatgtatatatgtgtatagatgtatacatatgtatatatgtgtatagatgtatagatatatatgtgtatatgtgtagatacacatatacttgtatagatatgtctatatctccctgaaatgatgcgtatatatatatgtatagatgtatctactagagcagagtgtgtgtgtgtgtgtgtgtgtatacacacactctgatccagtatatacatcctgtgaattgttataataacagtagaagcatcagtatctgaaaatgtatgcataagatattggccaggtgtggtgactgctggtgggaatgttaatcaattctgccattgtggaaagcagtgtggtgattcctcaaagaagttaaaacagaaataccattcaacccagcaacctcattatttggtatatacccaaaggaatataaattgttctacgataaagacacatgcacatatatgtttattgcagcactattcacagtagcaaagatggggaatcaacataaatgtccatcaacagtagactgattaagaaaatatgctacatatacaccatggaatacaacccagacaaaaataagattgtagcaacatggatgcagctggagccgttatccttagcaaactagtgcatgaacagaaaaccaaatatcacatgttctcacttataagtgggagttaggctgggcgcagtggcttatacctgtaacctagtactttgggaggccgaggcgagcgggatcacctgaggtcgggagttcgagaccagcctgaccaacatggagaaaccccgtctctactaaaaatacaaaattagccaggcgtggtggcgcatgcctgtaatcccagctacttgggaggctgaggcaggagaatcgcttgaaactcgggaggcggaggttgtggtgagccgagatcgtgccactgcactccagtctgggcaacaagagcgaaactccacctcaaaaaaaaaaaaaaaaaggggagttaataacaagaacacatggatataaagtggggaacaacagacactggagcctactcaagagtaaaaggtgggaggagggagaggatcagaaaaactacctatcaggcaccatacttattacctgggcgatgaaataatgtgtacattaaacccccatgacacgcaatttacctatgtaacaaacctgcacatgtactcctgaacctaatataaaagttaaaaaagagtagctgtctgccactgaatacaattctgtccctgaatataatatctccaattcccaatcagttaattaccccctagtgatctgaatgctttctggcatgctttctccacctgatacttttcttcattccaatctattttttctttacagatttaatcaatactgagtacatgaatatatcttatgtcttttgcttatcttttcacaatgttacttcctttttcttaccccttgggcttccgtgagacacagttgcctacctaattgtttttcctgtggatatagataaattttattggaaaaaaaccatgaacatttatttaggtattatctgtggctgctgctgtgtgtgtgtgtgtgtggggggggggtgcgatgtgtgttccaatgacttattttttattgtggtaaaatacaaatgatgtaaaatttaccatataactattttttattttttaattagcaaaaaaaattgtatataccatgtagcatatgattttttaaaatatctagatgttgtggaatgcttcaagctaataaacatatacattaacttatatgtttatcatttggggttgaggacacttaaaatctattctcttagcaattttcaaaatacaatattgttattaaccaaagtcagcatgttgtacagtagatctcttgaatttattcctattaaatgtaatttagtatcatttgaccaacatctgcctaaccctcctcctccaagctctatcccctgctaaccaacattttactctcaattctatgagctcaacattttaaaatttcatatacaagtgacatgatgtaatgtttgtctttctgtgcctggcttatgtcatttgacgtaacgtactctagattcattaatttcattgcaaatgagaggattctctgctttttaagtccgagtagtattccagtgtgtgtgtgtgtaggtctgtatacctgcattttctttattctttcatctactgatggacacttaagttgatttcctatcttcgctattttgagtagcactacaatatacattgaagtgcagttatttctttgacatattgatttgtttcctttggaatatatacccagcagtagaattcctgaattatatggtagttttatttgtaattttttgagaaacctccatactgtttttcatgactacaataatttacatttccaccaacactgtgcaaagattcctttttctccacatctttgccacaacttaccttttgtctttttgataatagccattctgtgtgatgtaatatttcattgtagttttaatttgcatttctctgatgattagtgatgttcaacattatttcatttatgtgctggccgttggtttgtcttcttttgagaaatgtctattcaggttcattgccctagatagggtttgaggtatcattttttctatttttttagtgtataattcagtggctttaagtatatttctgttgttgggtagtcatcaccgctatccatctctagaatgatttcatcatcccaagttgaattcatactgattaaacgattactctccattttcacctcccctagcctttaataacttccattttttctctatgaatttggctattttaggtacctcatataagtagaatcatacaatatttgtcattttatgtcttgcttatttcacttagcatatgtttccaaggttcatttatgttgtagtttgtatcagaatttcattcctttttaaggctgaaaatattccgttgtatgtacataccacattttgtttatccatttatctgtagatggacatttgggtgttctcacattttggctattgtgaataatgttactatgataattggtctaccaatatcttaatctctgtttttaattattttggttataaacatagaggtagaattgctagagcctaatggtagatacttttttattatgtgaccttctgttgtgaactttttgacactgggggggtagtaccttactttcctttatcaggtctgagcccagtacctgaatatagtggaaattggaccttatgagaccttttatgaggacaaggaaatggaggaactatcttcctgcttacacagtgacaagtcttatgacagtggataaggggttactggaatctaagttcctattacttgatctaagtctccccagagtcaggtccatggcaacccaaaacgtatctaccagcagtgcttcccgcagtatgagtgagtatgtttcctaaaaatagcatattctctgcttaactgcttgagtctttagtgctatatcatctgattgtcactatcactagaattaagtttcatgaaagcagaaggtttttacttttacatgctcttattacttcattgcctggcagatagccaaaaggtacttgttgagttagtgaatcaatgaatcaatagataaattcatagtggcttttccttatggaggaatttctctcctctactgccatatgaggaatccccagatgatgatgcagatgatgatgctttcttattcttgaatgatcaatctccccttcgatgtagtaacatcttataaaactaaaatacgatatcatgaccaagatgtcaacattcataaaaccaccaatagtattcagattttcccagctttactcatatttatgtgtatgtgtgcatgcatatgtgtgtatttagttctatgcaacattattacgtgtgtaggtttgtaaatccaccatcagagtcaatatgcagaacagttccaccattacaagggtccctcatattgcccttttataagaacattcagctaccccacatcttactcccattcctgacctctgccaactgctattctgttctctatttctgtaactttgtcttttcaagactctcatagatacggattcatacagtatgctaccctttcagaatgactttttccccacttagcataatgcccatgaaattcatccaatttgctgcatgtatcaatagtttgttcttttcattgatgagtgttattccatggtgtggctgtactatggtttgtttatctacccctgagggcatctgggttcccagtttggggctattacaaataaacgtagtatgaacacttaggtgcaggtttttgtgtacacatgtgttttcatttccttgagataaatgctcaagagcccaattaccagattgtataataagtacatgttcagttttgtgagaaactgccagactgttttccaaagtggctatatcatttgagtttccactagcaggggttgagtcatccagtttctccacaccctcaccagcattttatggcactattttttaattttaaccattatgataaatgtgcagtgatacattattgtggttacaatttgcattcctctattggctaaaaacattgaacatcttttcatatgcttgcttttcagatgcttgtgtttaactttactccaccttaaacatttgaggagtgtgaaggacaggagacacagagatttgccttgattaaggcaaataaaaccctgccagattttcatttccaaacacagtcctagacagagataagagagctggcagtttgctccattgtttattagagacctaacattcattctaaaacagaggcgttttactaaaatgcagtcagccttaattataatggcactccttggagctaggtggaagtactggtgaatttttctgagttgtaattccatactagaaagcatatcttaattttaaacatactttatgacattttatttggagatactccagttgacctctttaatctgcagtaatctattcatgtgctgaaagtaaatatatttggggtgcttgtttgttatggaaagtgattttacacatgcattttgtttaatttttagattattttcaaaaagcttcaatgctaagtctctgaaaatagctaaatgcaattaccttcacgtttttattattattattattgcaactaggcatttggtctcttaccttcaaatgttttacccctttctttaacaggttgatttagtgaatattggaagtactgacatcgtagatggaaatcataaactgactcttggtttgatttggaatataatcctccactggcaggtaagaatcctgatgaatggtttccttttgggtaacattaatcttgttttttaatttttacccttgacgtgtgaaacaaatgtgtatttctaacaataacaaaccctgctccatagtgctgctttttaaattgacactaccatgtcgtctgaaatgttaaggatcatcacggtataaaataggttctggtacatttacaggaatatttttcaaaattttatttcattgagtaagtataaggtaaaaatacaaagtcccaatcataggtgagtaatttttttcacaaatgtatgttctataacttgtctataagttaatttagtatgttttattttaatcactaccaaaggaatgaggctttctcagtcttgggtattcttaacataaattattgccaataaaagattagtagaatatgggtatctctatcaataaatgtgtgtaatacatacaaactccataatgtgatttggaaattatttttaagtcacctgagcatagggtcttccgactgtctatttgacctctgcaaaatgggttgaaggatttgtggaaaagatacagacacacacccgtgtgtgtgtgtgtgtagtatatatgcgtatatatataatgtgtctatatatacacacatatatacaatatgcatgtgtgtatatacacacactcatatccacacattatatatgtatatatatacacactcatatccacacattatatatgtatatataagaccaacatgaacttatatccactaatattatccactcattgtatacatatacataatagtataatcataatatgtatacataatcatacatgaacttatatccactaatattttccactcattgtatatatatacgtaatagtaactcgttatacacatatgtataaatatgtatgtgtatatatatataccaacatgaacttgaatttaaacttccacggttaccatcttagtggcatttggtatattgccacccctgttctgggccatggtcccttcactatcaaaagagtaaaaataaaaataaatgtgtatgtatttcttatcacgattaagtgggagaatatctgcaaggcactcagtgtagtataccacttttatttgaggtgtatcatatgacttgtattgattgcttaaagttttccactcatttaaaaaatttggaggctgagaaatgactgctgtttttactggtcgggattacttttttataaatcagcgtttttgaaatgtaattgttagaccatcaatgtactcattctaagtgtaaaattcaatttgcatcaatctggtttagttctggttcttggtagcctctcaaactattttgagggatgaataactcccccccaccacgttcattaaaatttgcaggatatttacagagttatatagccatcatagcgatctaattttggcacttttccaccaccttaaaaagaagtttcttctccatttacagtcatttttcactcccaccccagccctaggcaattgtcaatctatttctgtccatatgtatttgcctttttggatattttatatcaatataatacatgttcttttgtgtctggcttcttgcaatgagggtaatagttcagatccagccctattgtagcagatatcatggcttcattcggtaaacttgaatttttttattttttatttttatttttttttatttttattttgagacagagtcttgctctgtcgcccaggctggagtgcagtggcgcgatctcggctcactgcaagctccgcctcccggattcacgccattctcctgcctcagcctcccgagtagctgggactacaggcgcccccccaccacgcccggctaatttttttttgtatttttagtagagacggggtttcaccgtgttagccaggatggtctcgatctcctgacctcgtgatcctcctgcctcggcctcccaaagtgctgggattgcaggcatgagccactgcgcccggcttgaattttaacttgaattgtagattgctcttgctcagagtcaaatagtgagtagacacaaagagtacctattaaattcagcagccatgttgctctcctaattggcccccatatatttttattccaaattctctgaacaggcttaatgctacttcacaacagtaagcggggagaggggaagagaaagagcgggaattaatatgtgctggcaacaaagaatagctcataggagccttaagtgagcccaagttggccgattttcagcccgttccatatagtgatggtgtcaaatagaaccagcaagcaacataccgcatctctccccaaactgcttttcatatgttgctcagtacttctcaaaatatcttgaggaaggaacacttttcccctaatccattgtatgtaagatagaataaaaccaaagcgttacaaaaataagatgcccaacacccatgcttcctcctttattattaaatacattagacataaatggtactctgtaaaatcgctacataagtttcttgatgcactctgaattgttgactttatcttatggcatagtaacaaataattcctagagtgaatccagtttgcagatcccgctttgcgtaagacagatgtaagttttgacaaagccagcagaagaactcaagcatgcacagagctccaaaaggcactctgaactgtatttattgtttatactacttcttatatgatcttaccatttttaaaaatatcctgaagccctttccaactccatctgaactagtccaagataagctttcaagactattatgtctgataatttcttcacttgcttgcaagttgttcatttattattatttttttattttttatttttgagacagagtctcgctctgtcacccaggctggagtgcagtggcgcgatctctgctcactgcaagctccgcctcctgggttcatgccattctcttgcctcagcctcccaagtagctgggactacaggcgcccgccaccacgcccggctaattttttgtattttgttcagtagagatggggtttcaccgtgttagccaggatggtctcgatctcctgaccttgtgatccgcccgtctcggcctcccaaagtgtttggattacaggcgtgagccaccgcacccagcccatttttcattattagcatgtggaggcgcttttgcaatgaggaatatcagaaggaatgctttttaaatctttctttgtctgagacctctcttatagcctgttgtttttcatttatgcccttgaatcaccatatccttgagactgcaagactgtagactcttcccagcctctgcttacttatctcatctctcttatatcacactgccctgttctaaaactattaagcacactttgaaaaattatcttgctcagtgttcatcataatccagtgaatctaaaaatgtgtttttcttttttttttttttttttacaccaacattacatattttcttcctattaaatggtagaagcccttgaatttcagcaaagattaaaggacattttggtcaacttaatgtacattctagatctatcagataacgagcggcatttacagatagaaccatgttggcccctttttctaatgcaacatactatgttattaatagtgccatggaggacttctcattgaacttgtgaaaactcaggaatgcaaactctgttttcctattactgtttttctactgtccatctcaaataaaattgctagcctaaaacagtaacgcatattttgtaacataggcaggtttgaacaaaattgcaaagcatataacatgtgtttggcatctttttcttccttcttaagtgcaattctttttttttcggagtgctaaacttggctctggcaaccagctggttgtaataacaaatcttgctaacagtggtgagctatcagaagtcaggtccatacttttactggacaattcaagggatgtacttaatggcaacgctaattcactttagaatgttcatattattgatacaatttgcaattacaggagaatgatgacgttcgcactgctgaaagccatccctgtaaattcctgcctaccaagtcacttctgtgcaagacagttcttgctctgctcttctgcagagcttcacagaaactatccttaccatataagattattcctaccctcttcatttctattcctctgctgcaacttcttttaatcacagtctgggttctggggagtagacttcggagttgagtttggcaggcagcatgtttattaagccatgccctggaaaaaaaaaaaaaaaaaaaaacacctgtagaagggcagaggtgacaggagtggaaagaggaagaactagagctgtgacgtagaccctatgacacgcttattcaaaccccatagacaacttgcagctaggatgacccctcagagttgtctcaaatggggttaaaatggctgagtgtttatactctgccccttcatcagtcaatagtagtgggttgccctagagagggtgtgacattggctggcaggactctgcaactcaggtggtacctgagagaactaacaactagaagctgcctgaccacagctggagcaacaagcccttccttgaaggtcaatcttggtggtgcacctccatgtccatcatgccttcttggcccagttaactcctagtcatttttaaaaatcactgctcaaagacatttcaacttttttccttttaaaaattgatttatagttgtatgcgcgcacacacacaaatacatctgtttaaattgagcctcctttagagacagtgagacctgaggacgggacagttttctgtttacaggctcacctttggggaccagctcaatgattttttgataactgccttttatgtaggaaaaggagacatgattatcatacattgccctttattatttttttttgtctgagcaacatttgcacctaagtagaagcaataacagcgaggctgaggctgataagctgaattagtgacataatgatgctataaaggagttttggattgaatactttgttgtcctttaacgttatgcacatagagggcagactggccaagcatttcacaaatgaatcacattcatcattggaggattgcttgattattgcaaatccattaccaccattaagccactatctgctgattccaaccgtaatttagcacaggacacaaaatacacctcctgcagtcactgtacataaaggttgagcaatttataattttagaatatgagacaaattacgtaattatttgacctgtattcactgagtaactgactaaataagtaggtcaagaaggaattaggaaaacttggataatccactcctaaataataggcttagttatcaagggattgtgacagatacatgcaaagatttcatatctccgaatcgttactgtgtttacaaagcatcatctcaaatcttttaaaagtatgttaaaatgagatttagtagtatatcctaaaatttgcatttactttttaataaaaagatgactaacattggagatgttaaaatatgcatttaccccaaaggcatttgttaacttctatatggatgaaaaaataaaattgtcatatttagaatgcacaataaatattcatcatctgatcaaatgttgatagtatatgaaccttaaccttcccagaaggaaagtgcttagtggtacagactgatcacttttacatagatgtcttcttccagcatctcataaggggcttatatttaaaaagcagtctttaataaataataattctttaataaaagatgtagacagttttttctatgaagcgtcactgcattcatgaaacttagaaaaaatgcttagaatggatttctgcatcagatgactcagaagaattaaacttgataatctgttgaataacatctgcacatgcacgaagcctatgagacaatcaaatacatggaaaccaagtaatgaaaatagaaccaaggctacatatgtacacctcttagggataaatatttccttcctttgttgttttttttctttattttaggtaggcaaacatttctgtcttcttttcagttcagccaataaatatagcttgcgttaaatgatggtatgaaatcaggggttttatctgaccatattttgtactttgatcttacactaaccttgcatgtaagatacacagaaatgaggcctagaagaggttaagcaacttgtccaattaccacaattaatagcaaaggcaaaatttgaacatatactttaaaaaacaattatctatagtattcctcctatccaaaaagcgcttttatatcttaagtccttggttaacaataagtctaatgttttatacactgtcttctctagcttgttcattgaaagctagaaggtgagcaattctataaacagtaaatgttgggtctaatatggcagaatccaggagtaatagtgaacacattcagtaaatggtatggcatagataccaatgaatcagaatagactcctagcctttgagaatagacttaacttctggtagaatctattatgtctcattactaattggccctaaaatttctatttatcactgaagatcaaggacattcatatttaagtttgcatggttcttgctcaaggaatgcattttcttatgaaaatttatttccacatgtaggtcaaaaatgtaatgaaaaatatcatggctggattgcaacaaaccaacagtgaaaagattctcctgagctgggtccgacaatcaactcgtaattatccacaggttaatgtaatcaacttcaccaccagctggtctgatggcctggctttgaatgctctcatccatagtcataggtaagaagattactgagacattaaataacttgtaaaagtggtgatttagactctgatgacatatttttccccagtatggttccagatcatgtcctactttacaacatgttatgtacattgaccacattgatctaacgttccattggaatgaactaattaagaatattttccagtgttctatgggatacatataattcagttgttgaaacattaacattagcggagcgtgaaagtggttatagtggagggggagagtatcaatatgtttgacactgggaatcccagtaaatccaggttgtattctaactttgccgagaatggtgttggtctttttatacagataatgtgtttgtataagcctaaactatacaggtaaaaatgatactagatctcatgtgagtagttgtagttaaattaattaccatcatcagatacgtagtgtggagaaagaaacatctgtcttatcagatacacactttgatatcaaacaccataaagccctgtatactttgttctagttcagggtcataagatgctcagagcatttttagtaaccaagacaaagagcagaacacaattaattatatgacacaatgttttgaataccaacagaaacaattgcactggaacagcaaatcaattgctataaagcaagagagagatcttttgtggattttaataaaaagaattcactgtaatacagtgaaccaaagtccttaactatattccattcaacattatatttcttaagatgaaaaagattttttttgcttttcttgtgtaaagttcagtaaatgaattaataacagttcaagaaaaagcaaagcagtgtaggaaatacatatgtatatgtacacatacacttagagatacaatatatactatatgccatatatactacaccatttatactctatatatgtatatatatgtgtgtgtgtgtgtgtatatatatatatatatatatatatatgcttgtgtgtgtgtatttgagagagagggactacagtcactttattttggtcttcctgttacccgtttcatttacccaacccagggctaaatgcattgcctaattaactgtttaaaatgtcactggactgcatcttgcctaattttcagtgcaagttatgttttctcactttgatttttttttttttttgaccactctaccattttcctatgccaatcctgcttctagaaaagctaagaatattaattttctctaaggtaaagctcagtccaagagcaaacacatttcaaataagcatctttgtcaggtgtcttgctccagctggatttaattaaccccatcccgactgggtttccaggtgaattactcagcaacctgatttagaacagaggcagacatgcattcaaatgtcacgttaagcagcgttaacacattgtttctcgtatgacagaagaaaatgtttccacagcctcaatacagttagatgagaagggatagagacattctgtctgtgttttaagtcaatgctcatttatgcagccacatgcttaacactaagggcccgaaaatattgattttgctgttcatgtacacatttgcagatgaataaaaatatcaaggatcaggttatgtggtccttgttggctctctaacgtttttcccttcaagtggaagacttcaatcctgcaagcatgttcccactctatatttgttaatattctatttaatgatttctgaatacatttgtaggtaatacagtaaacatacccaaattgccctgttttatctgtccctgacccactctttctctgtcaaaatatcctcatttatatactctctcctgtcatattggatgaatcatcagtaactctctttatgtattacatggttacttttcaagaggttcttcacagttgtttaatgttctttcatgaatcatctcccccttctttttgtatttggcagatgttcatattctttatctaaagaaaaaaatggttgaactctctgttccatagcgattgtcgttggcacaattaggaatgtcatgaggtgccctcatttcaataattgagtggttcaactatacagaacaaagacatgtagttaatatagagcataaggattgactaagtgtcatggcagttaaaagttgtgtgataaaacgcaaagtccactacaatacccttcaaaggaagccagatttctactttttgtgttaaaacccaatgataattgcttagaaatatgtacaaaagatgcagataaaattacaataactataaagttacaattgtcttcctaaatccttattttagtgtattaccacagcaaattagaagcaaatgaacactagaatcaggagcaaagggaaaacagaaacacaatgtgtcttcatgaccccaatcttaacttaccttatttcaattcttagatgcagtcactgtcagctacttgtactttggttcctgctggttataataatatgtgtgataatgtttctacttgttgacaaactaatttctaacagtataggtatttactccatagtatgaaaaccagccatattatgtttcatccccaggtatttcctaattttattacttataatcattttatagttgtaatttttgcttttattacattaaatggtatgagtatacctcattttaaatttttaccaagtttagaaaggaacttttgaccaatatgaaaaacgagaaaatcatcacacattcttactctcgcctcttctccacctcccatttcggattacattctgtttgcatcagtagtatttgtaacatttatatcagttctgtaaagataggtgtttttggcttgagtctgtaaattgaaaatacatcactcttcttatataaatgtaattaacattacagcaaaataatagaaacgaatgtttttaaacaattattattttgtagacaccgttctaggtaaaatattcaatcaagttccatgacgtagatgctgtcattttacccatctcacaaatagataaattgagtcatagagaggttacgtaatttacctaaaactgtttggctaacatgtggtagagctaggatttaaatttacactatcctaatcatggtgttgatttaattaaaaatctggtgatccttggttgcaagtcaataaattatggtccaggttaacattaaatgctgtgtgggtttccttcatagttggttagttttacaatttttatgcatttgaaagtcatagatatttaaaatgttaattaattttaatagtataaaagaattcaattcatttttaatgctagacgtgacctcaaaggccttttggttcaatgctttttgaatgagaatgccaaagctcaaataaattatatgacttagataagatatccacacactcagttggttagttagtggccaaggaaatggggaaggtaagacaagggaatacagcacgaatgcataagcaatgctcttttttctcatcatactcaatttaaccttgtatactatgccatagatgagaaaactagtttctcatatgttcccacctatgtcctttttttactcccattgcctacagaaaaaaatgaagataaggcagagtgcgcatagtgaacttaaaagtcccctaaatattctacaatttttaaatttttttatatatttttcataacaaaggcattatccaatttgtaaataagctagtttccataagcttgttagctgttaggggtattggaaaatatggagggattcgatttcctaataattgtaaaaattctggtgtattaactagagtagaagcaattaagaagaaaccaataaacctatacctttatttatgtatttttttgagacggagtctcgctctgttgcacaggctagagcgcagtgggccaaccttggctcactgcaacctccacttcccaggttcaagcgattctactgcctcagcctcctgagtagctgggactataggcacgagccaccatgccctgctaatttttgtatttttagtagtgtcggggttttaccatgttgtccaggctggtctcgaaatcctggcctcaggtgattgacccgtctcggcctcccaaagtgctgggagtataggcgggagccactgcgcctggccaattttgaattacagttttagaaaaataacagctaaactacctttgtaactttttttttgtttttttcgttattttgtttttttgtttttgcatagcatgagctcttaaacaggagtccattaatagattcaaatattctaaaactgtatgtagactctgttcacagatatggagagtttttttgtaggagtagaagtttcatagctctcaacagattctcaaaggtgtctgtgattcagaataggtgaagaaccacttgactaatgacttccagtgctgttgggataaattataatacgttaacagccaacaccttatgcaaactcagccagtttctttcttttaaacctatctcccaccacttgatacttagaatcttccaatggagccaggcctgtgaggtcttgattatctgagcatgttttgcttttttccttccctaagaactttaattctctaacgctcacacaacttagaattctattatcaatacattttttttaatgcaagtcgaaacgtctatttaatctgtctttcagcctcagaaaactttcttgaccgcttcagattttacaaaacattttcttattgtctgtgttttttcacatttagagtttaattaattcatatggcttcttcatttttcttgctcattaaatttaaaatccttataagacaagaactgcctcttacactcctttgcattttctctattatcaagtaacatggtatgtaagtttcatgtgctcatccattctctcgtgtagttgataaatatttgttgagcctttattttgtgtcaggctaggtttccagcagtgaacaaaataggcaataaaagattgtacattctagtggaagagaaagatacacagagaaatttaattaaattatataatacgttaaatagtaagtgttaatgagaatagtataaagcagataaggagaaagaaaataagtatatgtgagtttgatttgaggcatgcagttttctttcatttatctatttaggagactggttcttcctcagtcacccaggctggagtgcagtggtacaatcatggctcactatagccacccaggctcaagtgattctccaacctcagcctcctgagtagctgggaccacaggggcatgccagcacacttggctattttttttttttttttttaataagttgtagagaccaggtctcactatgtggttcaggttggtctctaactcctggcctcaagcaaatccttcagcctcagcctcccaaagtgcttggtttacaggtgtgagccaaggtgcctggccagcatgcaattttagatagggcttgggcagggaagaacttatcagtgatgtgattttcgagtaaagacccaatggaagtaaaggagtgagccatgtttatgtcttcgaaaagcgaattccaaatccaagtgcaggaaactatggatcctgtttatggaatatgaggaaagagacaagaaataaaatcagagagttaatagggacctggaccctgttggacttcgtagatcacatgaaatacgtaatttgtacttcccctaaagcagagatttgagaagacggatatgatgaaacatgttaacagatcactctggcaactctgctatgcactaattaacgcaggcaagagtgagagaagagttatgaggctattgtgataattcatgcaagataaaatggattttggactagagtgatggcagtgaggatagtcagaagcagtcaaattctgaatacattttgaattaaatgttgtgtgagagtaaaatagtcattaaggatgactccaagggtttttatctgagcaactgcaattttaaacacattgttcattattgaggaagggagaacagcaagaaaagtaggtaggtttgggggagtatgatgaggataaacatcagaagctcagttcaggacacttgaagcttgtgattactaaatggagataatgagtgtttagaagaatctataatttgaagtttagggaagaggtctgggttagacatataaaactgggcattaccagtaaatggctggtattgaaatccacgagactggatgagatagataaatttttgttgcttggataagctagcgtagattatttgtcatcttcaggattttcttttttccccacatctttattgctgtataattgacaaataaacgttgtatgtatttaaggtatacatcctcagcattcttttttgatacagggtctcactctgttgcccaggctagagtacagtggcacgattatggttcactgaaccctcaacctccctgggctcaggtgatcctcccacctcagccttctgagtagttggaactgtaggcatgtgacaccacacccagctagtttttctttctttctttctttctttctttttttttttttttttttttttttttggtagaaacaaggtttcaccaaattgtctaggctggtcttgaacttctgggctcaaaggatctgcccacctccgtctcccaaattgttgagattacaggcatgagccaccacacccaatgagatcttccattaaaattattacttgtttaaatagaaatattttaaagggtaaatgaattacactcaagacttaaggactatgggcattggttgtcaatgaaaattaagcatggaagtaaatctcatggaacattctagattgatttatatttgtctttgtgtatgtgtgtatgtgtatgtgttttaggccagacctatttgactggaatagtgtggtttgccagcagtcagccacacaacgactggaacatgcattcaacatcgccagatatcaattaggcatagagaaactactcgatcctgaaggttggtaaatttctggactaccactgcttttagtatggtagagtttaatgttttcatctgagacttgtcatttctacacaaaatacaaaactacatatcttaagttttccaatactgtagatatatttaaaatgttcagccttcttgcactatattatgaattgtcttatttaattctagttctcaaaataccagtatctaaaattgcagtgaagacttttaggaaaaaagcctttaaaatgtgtatgccctatggatggagcatactgcatttggagtgcattgactccaaataattataaaaagttaatgttttgcttatgctaccaagagatttgatagagtaatcagctataattaattagctactcttgccaatttcattcatatactctataaaaggcaacatggtttactatttaaatcaggaaatctattcctgccactacttctgttgtaatttttcactctggggagatcctctgttggatggttactcattttctgcttctttagttgataggcagaagtgtatttatatttttattacattacacttcaataactttgactcttatctctggtgctacatagtcataccttccagacgtagagattacagagataataacactgtgacctctactcttcttctagcctatgaagtacactttttgccatgccaattttgaaatggtagcctctgttctcaattctcaaggctttactacactctaaaatcaggagttggaaaagtgaaatcggtgggattgaagatgatatttgggtagaagctgttctacaatagaagctgataattaaatgcttttgggaatattaaatcgatttcatcaattccaaaacaggagatctttcaatatggatggtaggtcccatcaagaaaactcaaaaatgacccagaagacagccttttgccagtgaatttattatcaaccagaatctagtactcagttttgcagacgcagaagcctgattgcctcagatcatctagcagatccacattggggtgggaggagttaactttaagtttaaaaagtgatatataaataaaaatggaaattcagtaatcttaaatgagatataacaagcagcagaatattcacatacaattgacaaatatattgctcttgataagcacatgtacttgggaaagcaaattacaacaaaaatgttagtttgtgaagttgggatcagattaagttgacttgaaatgtttcttctcctttggataatgcatggctgaacactgaatactgtaacccctttttattgcttctatacacgatagtatccctcctacccctgtttttagctctaagggagaaactattaatcctacgtccttagtttgcagtataggggaggattactttactattgactcgtagtacacatttgtatgttttctcttagttcagtgaggtagaaagggcagacataatgaaaatacggacttcaacctctgaggataaagagctatactgtatgaatttgaaagataaggctgttaatatgtttgttttttattgaatcacatatggtcagttcccattattggggtgtatgctctagttattcttgtgtgtgtcctatcctttcataaaacagtaagagaagatttaaaaatagatatttttcttattaagtgacaaaatggcttttgacctctagtgctcctttgaacttacagaataggagtgcctaaatgggcatccacatcataatcagaaaataggtaaatatatacacctatgtatatatccacaaaaaatttaaatgaataaaaacaattttaaaaagtaggttgacgagcctgtaatcagaaaaaggcaggtacatgaatagtgtattttatagctaaaagagcctggtatacctaactccatatgctctcctaagtgggaagtatatgtagaaaggtacattgtatatcctataagatcaccattttactgtctcaaacttcaacaatttaaaatcaacaaaatgtaatatgaaatacaggctgattaatgaagatccagccactgcttatggtctcgttttcccaataaaatctcatatctgtaaagcctttctatatatagactcttccaattgaaagagcatcttatcgcttaaacaggtttcctgtttatttgcgtagaggtgtttgtagtattctctgatggtagtttgtatttctgtgggatcagtggtgatatcccctttatcattttttattgtgtctatttgattcttctctatttttctttattagtctatctagcagtctattttgttaatctcttcaaaaaaaaacacctcctggatttgttgatgtttttttttttttttttttttttttttaaatgtttccgtctccttcagttctgctctgatcttagttatttcttgtcttctgctagcttttgatttgcttgctctggcttctctagttctttcagttgtgatgttagggtgttgattttagatctttcccgctttctcctgtgggcatttagtgctgtaaatttccctctcaacactgctttagctgtgtcccagagattctggcacattgtatctttgttctcattggtttcaaagaacttctttatttctgtcagaattctgttatttacccagtagttattcagaagcagattgttagtttccatgtagttgtatggttttgagtgagtttcttaatcctgagttctaatttgtttgcactgtggtctgagaggttggttgttatgattttcattcttttgcatttgctgaggagtgttttacttctaattatgtgatcaattttagaataagtatgatgtggtgctgagaagaatgtatattctgttgatttggggtggagagttctgtagatgtctgtgaggtccacttggtccagagctgagttcaagtactgaacatccttgttaattttctgtctcgttgatctaatgttggcagtggggtgttaaagtctcccactattattgtttgggagtctgtctctatgtaggtctctaagaacttgctttatgaatctgggtgctcctgtattgggtgcatatatatttaggatagttaggacttcttattgcattgatccctttaccattatgtaatgcccttctttgtctttttttgttttttttaaatctttgttagtttaaagtctattttatcagagaatagaattgcaacccctgcttttattttttttgctttccatttgcttggtaaatattcctctatccttttattttgagcctatgtgtgtctttgcacgtgagattgctctcctgactacagcacaccatttggtcttgactcttcatccaatttgccagtctgtgtcttttaattggggcatttagcccatttacatttaaggttaatattgttatgtgtaaatttgatcctgtcattatgatgctagctggttattttgcttgttagttgatgcagtttcttcatggtgtcgatggtgtttacaatttggtatgcttctgcagtggctggtactggtttgtccttgccatatttagtgcttcctgaaggagctcttgtaagacaggcctggtggtgacaaaatctctcagcatttgctcgtctttaaagcattctatttctccttcgcttatgaagcttagtttgactggctatgaaattctgagttaaaaattattttaagaatgttgaatattggcccctactctcttctggcttgtagggtttctgcagaaagatctgctgttagtctgatgggcttccctttgtgggtaagccgacctttctctttgactgtcctgaacattttttccttcatttcaaccttggtgaatctgacaattatgtgtcttggggttgctctttttgaggagtatttttgtggatgttctctgtatttcctaaatttgaatggtgggctgtcttgctagtttgggaaagttcgccgggataatatcctgaagaatgttttcccaggtatactaatcaaacttaggttttgtcttttcacatagtcccatatttcgtggaggctttgttcattccttttcattcttttttctctaatcttgtcttcacactttatttcattaagttgatcttcaatctctgatatcttttcttctgctggatcgattgagctattgatacttgtgtatgcttcatgaagttgttgtgctgtgtttttcagttccatcaggtcatttattgttttgcctaaactggttattgtagttagcaactcctctaaccttttttcaaggttcttagcttccttccattgggttagaacatgctcctttagcttggaggagtttattacccaccttctgaagcctacttatgtcaattcgtcatactcattctccatccagttttgttctcttgtttggtgaggagttgtgatcctttggaggagaagaggtgttctgggttttggaattttcaccctttttgtgctggtttttcctcatctttgtggatttatctacctttgatctttgacattggtgaccttcagatggggtttctgagtggatgtcctttttgttgatgctattcctttctgttttagttttccttcaaacaggcccctctgctgcaggtttgctggagtttactggaggtccactctagaccctatttgcctgggtatcaccagcagagactgcagaacagcaaagattgctgcctgttccatcctctggaagcttcgtcccagaggggcacccaccagttgccagccagagctctcctgtatgatgtgtctgtcgacccctgctgggaggcatctcctaggcaggaggcacgggggtcagggccccacttgagaaggcaatctgtcccttagcagagctccagtgctgtgctgggagatctgctgctctcttcagagccggcaggcaagaacgtttagtctgctgatgctgcacccacagctgccccttccctcacgtgctctgtctcagggagatgggagttttatctgtaagccgctgactggggctgctgcctttctttcagagatgccctgcccagagaggaagaatctagagaggcagtctggctacagtggctttgctgagctacagtgggctctgcccagtttgaacttcccagcgactttgtttacactgtgagggaaaaccgcctactcaagcctcagtaatggcggacgcccctccctccaccaagctggagcctcaggtccacttcagactgctgtgctggcagcgagaattacaagccagtggatctcagcttgctgggctccgtgggcgttggatctgctgaacttgaccacttggctccctggtttcagccccctttccaggggagtgaacggttctgtctcgctggcgttccaggcaccactgggtattagactcccacacaataatagtgggagacttgaacacaccccactgtcaatattagacagatcaacgagacagaaaattaaaaaggatattcagtacttgagctcagctctggaccaagcagacctaatagacatctacagaactctccaccccaaatcaacagaatatacattcttctcagcaccacattgcacttattctaaaattgacgacataattggaagtaaaatactcctcagcaaatgcaaaagaatgaaaatcataacagcctctcagatcacagtgcaatctaattagaatgcgggattaagaaactcaaaagtgcacaactacatggaagctgaacaaacctgctcctgggtgactactgggtaaataatgaaattaaggcagaaataaataagttctttgaaaccaatgagaacaaacacacaatgtagcagaatctgtgggacacagctaaagaagtgtttagaagagggaaatttatagcactaaatgcccacaggagaaagtgggaaagatctataatcgacatcctaacatcacaattaaatgaactagagcagcaagagcaaacaaattcaaaagctatcagaagacaaataactaagagcagaactgaaggagatagagacacgaaaaacccttaaaaaaaaaaaactcaattcaggagctgtttttttgaaaagattaacaaaatagatggctagccagactaaaaaagaagaaaagagagaagaatcaaatagacacagtaaaaaatgataaaggggatatcaccactgatcccacagaaatacaaactaccatcagagaatactataaacatctccacgcaaataaactagaaaatctagaagaaatggaaaaattcctgtacatatacactcttccaagattaaaccaggaagaagtcaaatccctgaatagaacaataacaagttctgaaattgaggcagtaattaatagcctacaaaccaaaaaaagcccaggaccagacagattcacagccgaattctaccagaggtacaaagaggagctagtaccattccttctgaaactattccaaacaatagaaaaataaggactcctccctaactcattttatgaggccaacatcatcctgataccaaaacctggcagagacacaataaaaaaaatttcaggtcaatatccctgatgaacatcaatgtgaaaggctcaataaaatactggcaaaccgaatccagcagcacatcaaaaaggttatccaccatgatcaagttggcttcatccctgggatgcaagattagtttaacatacagaaaccaacaaacgtaatccatcacataaacagaaccaatgacaaaaaccacatgattatctcaatagatgcagaaaaggcctttgataaaattcactacccttcatgctaaaaattttcaataaactaggtattgatggaatgtgtctcaaaataagagctatttatgacatacccacagccaatatcatactgaatgggcaaaagctggaagcactccctttaaaaactggcacaagacaaaaattccctctctcatcactcctattcaacatagtattggaagttctggccagcacaatcaggcaggagaaagaaagggtattcaaattctctgtttgcagatgacatgattgtatatttagaaaaccccatcatctcagccgaaaatctccttaagctgataggcagtgtcaacaaagtctcaggatacaaaatcgatgtggaaaaataacaagcattcctatacaccgataataaacagccaaatcatgagtgaactcccatttacaattgctacaaggagaatagaattcctagcaatccaacttataagggatgtgaaggacctcttcaaggagaactacaaaccactgctcaaggaagtaagagaggacgcaaacaaatgaaaaaacattccatgcttatggataggaagaatcaatatcatgaaaatggccatactgcccgaagtaatttatagattcaatgttacctcattaagctacaattcactttcttcacagaattagaaaaaaactactttaaatttcatgtggaactaaaaaagagcctgcattgccaaaaccatcctaagcaaaaataacaaagctggaggcatcatgctaccttacttgaaactacactacaaggctacagtaaccaaaacagcatgatactggtaccagaacagatacatagacgaatggaacagaacagaggcctcagaaataacaccacacatctacaaccatctgatctttgacaaacctgccaaaaacaagcaatggggaaagcattccctatttaataaatgatgatgggaaaactggctagccatatgcagaagactgaaactggaccccttccttaccccttatacaaaaattaactcaagatggattaaagacttaaatgtaatacctaaaaccataaaaaccctagaagaaaacctaggcaatacctttcaggacataggcatgggcaaagacttcatgactgaaacaccaaaagcaatggcaagaaaagccaaaattgacaaatgagatcttactaaatagctcctgcacagcaaaagaaaactatcatcagagtgaacaggcagcctataggatgggagaaaatttttgcaatctatctatctgacaaagggctaatatccagaatctacaagaaacaaatttacaggaaaataaccccatcaaaaagtaggcaaagggtatgaacagacccttctcaaagaagacatttatgtggccaacaagtatgtgaaaaaaaagttcatcatcactggtcattagagaaatgaaaatcaaaaccacaatgagataccatctcatgctagttagaatggtgatcatcaaaaagtcaggaaacaacagatgctggagagaatatggagaaataggaatgattttacactgttgggagtgtaaattagttcaaacattgtggaagacagtgtggtgattgctcaaggatctagagccagaaataccatttgaccaagcaatcccatcactgggtatatacccaaaggattataaattattctgtgcttatttcagcactattcacaatagcaaagacttgaaaccaacccaaatgcccatcaatgatagactggataaagaaaatttggcacatatacaccatggaatactatgcagcaacaaaaaaggatgagtttcatgtcctttgcagggatgtggatgaagctggaaaacatcattctcagcaaactaacataggaacagaaaatcaaactcggcatgttctcactcataaatcggagttgaacaaccagaagacatggatgcagtggagcatcacacactggggccttttggggtgtgtggggctaggggagtgatagcattaggggaaatacctaacatagatgacggattggtacagcaaaccaccatggcatgtgtatacctatgtaacaaacctgcacgttctgcacatgtatcccaaaacttaaagtataataataaaaagtttcttaaagtttacttatggctgcaaataagatgaggattcagcataagtcatatatttttaaaatatgtcaattcttgccattgtgttagggaaaccaccaagtacacatttatacatttttgctcagcatttttcaggagataatctcaatgatgattcaaagaaaaaaataataactcataagaatttttatttactgactgcttagtcacaaaagacagaacaccatctcttgaagtctcagacttagaacactctcttcgatagatttaccagcaaaattcgtgattcatgcctgtatagtaattgcttttgtgatgttcatatttttatttaaccagatattggttctgtagcttatgcatgatgttggctactctccaaagaaatttcattttaaattagttatgccccttaggagaataatgaaacatttggggagaattttattattgggggattgaagctatatttggtttaagaaatacctgccaaataatgctttgacaattttaaacataagctttgttgatagaattgctttataaaattaggaagtcattgaaaccttgtaggatttcatatatagaatttgatatgctttggccttaactggtgttttgaggcctgaggtttagttttaagtggaattgccttttaaaatgagtagcagtaggcattagcataagcgatttcaggagctgtttctagtgtgtttagatgctaacatatgcaaaaataagtacatctagggtaaacttaataaattatgtatgtttatgctcatagataataggtatatctctttaaaaatatccttttgtgaatcagacaattctcttcccgttatgatttctctgtaagacagtacattctacatgcgttggtcgtgggtttcatatacattgtttctctgagtttcaaacagattggtttgtttgccagtccaaaaaaaaaaaaaaaatcctccctatattaagagagtgctttgtcagctttcccctgtgaataacaaagtgaggatgttctctttaaaggaataaaacaaaaaatcagggataaaagattgcgcctgttctagatgtcttttgaatattagtgtagaaagccatttccatttaggatatgaaatatgatatggaaatgttcttacttatttaccagggtaactttagaacaaaaatgaataatgacagtcaaatttgaccaaaaaaggaaggacactaggactcgagagaaatttttgtatcctcaaaatgacatttacaaacccgttagggtttggttttaatcccctttattttgacttcctgagaatggtgacacggattctattttctgcttggctaatccctgcatcactcttgagttgtttttatagccttcttttccaagaattagctctgcctgttggaaagttttactcctggagtgaatgctttcagacttggctttgtatgcatgcaggattttaacctacaaaaataatcatggaaagatacatagaatttgctataaaagagaagaatatttttaaggcctcttatgttgggtttgatatcaattggctgaacaagggctgttttaacttttttccgcctctgctgtaatcatcacattttgataccataatggcaagaaatgtttataagtttacacaggttaaaattgagagggttaattctcaggaggattagagttaatttaaataaataaatatttttgtgaacataaacactaattttatatcatttagattgatttttgtctagaactcattatagagtaccttgttttcagaaaatctaatgcgattgcaatattataggtgttccttctctatatacggtatttcaactagaaatccttactgtaaatatttcagacaatttagagtcaaactctgcagttgaaaatatatttaagaaaatatttaagaaaatatttcactggcacttacatgaatgaaaaatggccattgcctttttgatgacaaagtaatatataccaaataggtatgatacagatgattatattaacattcagatattattgtagcaatttcctcttccctgatgggaaatcttgaaattgctcttcatgacaaaaattaagacgtaaatgttatttcccagtggcctaaaagttagaagaggcatgagagtattccagtgtgttctcttgatgttatgtgttgtacatctttctcagttcagataccataaaaaaactgagtattttctgggcagttggaaccagtcactaataaatgaaagcaatttttgttctccttatccatttcagttgtttggatgacaaataattgcatgtaactgtcccaaattcacctacttagacaacagagacttgaaaaacattaaatatgatatttgtgtgtgcgggagcctggcttgaatttaccctttataacaaattttggtattttctactaatctttcacattcttctatgatttgtcaccattttaactttatggaaaatggtcaatttataatttctatctcccctaggggctgatttgttaaagtatgctttagttaagtaagagtttcttactcagttggggaatttaaataatgaagtataatcatgcgattgaagatgtgcattatggattaggttctatgccaaatttgttcagaaacatttaaatataattcttacctagataactgagaatctcttttcaattagcttaccaggattattttcacaactttttttttttaattacaggtgaaataacaatatccttggcctatacagtgacattaagtgatttttgaatgattgacaagacattaataaattaataatgagaaatgcagccatgaggttctaatgctaaataatatgtaatagacactttgtggatggttttcctagtcatatcatcacaatgagttcatgagactaaagaaatatattaaaaacatctattggtatttgttaattttatttcagctatgaaggaatacatgagatattaggtttgattcagaaaagtgttctatagttgatatctgtgtttcttgtcacagaattttgccttggcaaaaacattttgaccattctaatgatggtaaatgagaataaaatggcataagtagtttaaaattttctatgtggttttaagtcagtgataatatttgaatgtaatgtatattttgctgatagttggaaaacttacttcactgtcttcaaaatggagttaactgtgttttatacataattataagtgatatcacagggctgggtgtgatggctgacacctgtaatcccagcacattgggaggccaaggcaggagaattgctttaggccaggagttcaaggctgcggtgagctatgattgtgccactactctcaagcctaggcaaaagaactgaggccctgtccccccatcccacaaaaacaaacaaaaaaagacatcacagaacctgcaaatgaatatccaaaaaccttaaagctgggcactggaaaaatagatattaggttggtacatatgttttccaattaaataatttctatatataaaatgcatgtgacattttacagctggaacatgaaatataagatgaaaatatactattttacaacaatatttgggtaaaataatgatgaactaaagtctttgttgatgtcatttaaatcttataagagggaaatttaattgtcatacaataggatttattccttgcagagggaaacctgaagatttatagttgtcttgtcattttattttaaagcaataagctatcctcttagatttattctctttttagaacttttatttttattgatgcataacgttttacatatatgtacatacatgtgatattttgttaaacgcactgaatgtgtaatggtcaagtcagtgtatttggggtattcattactttgagtatttatcatttttatgttctgtgaacattttgagttctctcatctactttgaaatgtacatcatattgttgctaactctagtcacccctttctgctgttgaacattagaatatataccttccaactatatatttgtacccattaaataacccctttttatattcccttcctacccttcctagcctctggtatcttattatactctctatttccatgagaacaactttttttacacctatatatgagtaagaaaatgtaaaatctatttatctttgcctcgattgtctcacttaataacctgcagtttcattcatgttggtgcagaaaatgtaattcttttttatggatgaagagtattccactgtatatatgtaccacattttctttatccatttgttcactaatggacacttaagttgctattataaatagtgcctcaataagcatgcaagtacaggtatgccatgcatatacttttcctgatagttagaaaagtatatgattgctttccctttacatatatacttattagtggcattgctgacacatactctatttctatgtttagttttttgagaaatcttctccatactgttttcaatagtggctatactgacttatattctgaactacaacaatgtattaagagttcccttttcgttgcacctcgtcaacatctgttgttttcttgtctttttaataatagccattctaactggggcaagatgatggctcatcatgacttgatttgcatttccctaatgattagtgatgttgagcattttttcatatacccgttggtcatttgtcttcttttgagaaatacttattattgtcctttgtccatttttaatgtgattatttttttactgttaaattgtttgggatcctcgtatttcctagatattagtctcttgtctgaatagtttacaaatcttttctcccattcagcaggttgtctcttcactctgttgaatccttcctttgttttacagaagctctttcattttctacagtcccaattatctatttatgtttttgttgcctgcgcttttgaggtcataaccataaaatctttgcctagaccaaggtcctgtctgttttccctatgtttgcttcatgtagtttcagttttaggtcttacctttaaatccttaatccatcttgagctgaattttctaatatggtgagagacagggatccagtttcatacttctgcatctgacaatccaattctcagcaccatttgaagaaggtgtccttccccctaatgcatgttcttggtgcttttgtcaaaaacaagttgtatgtaaatacatggatttaattctgagttctctaatctattccattgttctatatgtctgtttttattctaacaccttgctgttttgtcaagtagtgtgattcataagtctttgttctttttgctcaggattgctttggctattcaggctctctgctggtctttgatcgtacaaattttatgatcactttttattccatttctgtattctgatagggactgcattattcaatgtagaatgctttgagtagaaagatcatgttaataacattaattcttctgaccgataaacatgggatgactttccatttgttggtgtactcttcaatttgttttgtcagtgttctgtattttatacggacctttccctcctgggctaaacttactcctaggtattatttccagccgttgtaaataggtttgccttcttgatttctttctcagccagttcattattggtatatagaaatgctactgaattgtgtatgttgatttttgtatcctgcaactttactaaatttatttatcagatctgagagctttctggtgagggtttagctttttctagctataagttattaacaaagagcagtacttggacaacgatttcttctattaggacgccttgtatttctttctcttgattgctctggctaggacctccagtactatgttgaatgagtggtgaaagtgggcatccttgtcttgttcttttttttgtttttggttttttgtttttgagatggagtcttgctctgttgcccaggctggagtacagtggcccaatcttggctcattgcaagctcagcctccagggttcatgccgttctcttgcctcagcctcccgagcagctgggaccacaggcatctgccaccatgcccggctaattttttgtatttttagtagagatggggtttcaccgtgttagccaggatgatctcgatctcctgatctattgatccacccacctctgcctcccaaagtgctgggattacaggcgtgagccaccacgcctgaccattccagttttatagggagaaatttttcagcttttccccattcagtttgatactacttgtagatttgtcatatatggtctttattttgttaattttttttgtatgcctagtttgttggagtttttatctcgaagggatgttaaattttatgaaatgttcttttgtgtctattgaaaggatcatgttttctgtttttcattctgtttgatgtaatatgtcatatttattgatttgtgtatgatgtatccttgtatcattgggataaattccacttgataatattacattttttatgttctattggattgctagcattttgtagagaatttctacatcagtgttcatcagggatgttgtcctgtattttttgttgcataattgtctgggtttggcatcagggtaatgctggcttcatagaatgagatagggggaattccttcctcttcaatttttcttggaacacttacaggagaattggtaaagtttggtagaattcagcagtaaagacatctggtcctggactgtcttcgttgggaaattttttaagattactgattcaagatcattactaattatagatctgttcagattttctatttcttcttgatccacggttggttgtatgtgtccgggaatttatacattcctctagatttttagtttattatttaatagttgttcagtatagtctctgaactttttatttctatggtatcagttgtaatgtctccgtcttcatttatgattttgagtcttttttttttcttggttagtctagcaagtgctttattttcatctttttaaaaatcaaacttctcatttcattgatactttgtattttttgctctctattttcttgagttttgctcaatttttaggattttcatccttctactaattctgggtttggtttgtttttttttctttgactagctccttgaagtactttgttagattgtttgaaatatttcaacatttttgatgtgagcatttttgctatatacatcccccttagcactgcttttgccatatcccgtaggtgttattatattttgatattcatttgtttcaataattttttgaaaacatttcctcaattttcttccttgacccaatggtcattcaggagtatgttgttcaatttccatgtttttgtacaggttccaaagtttctctttttgttatttccttgtgttttaagaagatattagatatgattttgattttttataaatttgttaagacatattctgtcataacatatggtctgtcctggagaatgttctgtgtgcttatgagaaaaaaatgtgtatgactgttgaaggaattgtcctataagtgtctgttaggactatttggtctaaggagcagtttcaagccaatgtttctttgttaattttttgtctaagtgatctaatgctgagagtggggtgttgaagtcctcagatattactgtatttgcatctagctctccctttagatctaatacttgctttatatatctgggagctctcgtgttgggtgtatgtatgtttagaatttttatatactcttgctaaacttatccctttatcattatataatgaccttattgtttgtttttactgtttttgactgaaagtctgttttatgtaagcatagctgctgcttctcccctttggcttcggtttgcataaaatatacttttccatccctttacttcaaatctatatgtgtctttacaggtgaaatgagtttattttaggcagaatatttttgggttatatattttttaatccattcagccagtttatgtcttttatgtggaatgtttaatcaatttacattcaacattattactgatatgtgagggcttatttctttcattttattgatttatggttgttttgaatattttttcttcatttttttccctcattatcattatagtgtgatggtattctttagtggtaacatttgagtaacttttcttgattttttttgtgtgtttgcactactagttgtttttatatttttatgtgttttcatgatggtagttgtcattctttcacttccaggtataggactcccttaaacctttcttgtaaggccagtatcatggtgataaatttccacagctttcactcgtctaggaactattttatttctccttgatttatgaaggctaccttggctgggtagagtatccttggctggtggttgttttctttcagcaagtttaatataacatctcattcttctctggcctgtaaggtttcttctgagaaattcactgttaatctgatggaggtttctttataagtgacaaggtgcttttctcttgctgtttttagaattctctttttgtctttggcttttgagagtttggctataatgtgtcatggacaagacatttttgaattgtatccctttttgagatctttcagcatcctgtatctggatgtctaaatctcttgctagacttgggaagatttcatctattattttgttaaatagggtttctaaacctttagtttctcctttaccttctaggacataaaaaatgcaagcatttcatggctttatggtgttgtatatgtcacataggctttgctcatttttttaaaattttttgttattttttgtttgagtaggttattttaaaagacctgttttcatgttctgagattcttctgttttatctagtctcctcttgagtctttgcctttgattctgaatgtatatagtagtatacttcctgtatgatttctttggatgtaaacagtatgaatggtgtctgtaacttcctcagtagcttagggtgcagttgttagcagaagctgtggtgaagttttgccggtgactgggacaccaagtggtccagtcttcaggccccagtggtggcatcagttggttgagcgtgcctgtcctcaggcctcagagctgtgtacattggcattgatgttagtgtgtccaggcaggctaaccctttggcttataggtggcttgcttggttgtcaggaaaagcataggtgggctgggtgggtacacaggttcccagcccaggggcagcaagcatggtgcgggtaatggcaatagtgggaggggggcaaccctctggaatgcaagcaatccatgatggtgttggtggtggatgcaacagattgggcaagccagttcctaggcctgcagatggtgcatgtaggttgacgccagctttggtggtagtggaagcttgagtgggcccaaattcaggccccaggaagactagtcagatgccaatggtggtaaactggggtgggagagccccaggtctctatacaaatttttatgtactgggggatttggaagagcagagctgggaagacctgtcctcaggactcctggtggtgcatgcaaccactggttattgtagtcgaggggcaaggtgctccccaggtcccttgtgcaatgctcaggtggaaggcagtgttggctacactgtggccctgctactggagagggtaaggttgctttccttgggagcagccataagcagttgcctgggtagcctgtgcgtcgcttgtgtctcaactccacagcagttcacagtgacagcatttgcaggcagtggaattagtcttcagtgtgcatgaagttgagtggccacccctctgttgggcaggggagggtttgctgccagtggttcctgccttggccccagcagttgcagccatgggtgggaaatatcactgagactccaggaatgtggagatagggaagatttttagtcctaggtcaggacatagactggtgggggctgggctctcaaaaccaggccatgttgcagctgcttaggactctagagtttgtggaacccagcatgggcttcttccgtgaagcaatgcctttgcacagtatctagacagctgtgtgttggtttgggggcccacacgggttgaagggctctcaattggctaggattgtaggaatcttgtacaagaatgtgtacctttgtgcatctctaattctctccccatgttagggagcctctccagactcctagccaatctcagctggatagagtgcctcatttccttctttttccttttagtggttttcattgcttctctgttgaatttcagtgttttctcttagttaatgtattcaaagtatgattatctacttggtactttggttcctctccatggaagaggtgagtaacagatccatcaattcagccattttgaagccccagattttttgtcttatggcaatcgtgtggagttagtggatcatatgatatccagttgaaaagtgagaaaactgttacaactattaaattattaggaattttatatattattacaatttaataaggtggttgaaaccagtgtttttacttttaggaaatatcctgtaatatcattcttgtgagatgttaatattgctgaataaacttttgcttcaaatcaaagcacatttttcccctgcaaagatttttctaatttatcatcagtgatataaactcaaatttgcaagttccttttggtagaagagtgcaaatgtttaagtagggcagtcatgttctagataatttccatactttatcttatgtcttgtacacaacaattccaggtaagtttatccttcttttataaatggaaaaactgaggcttagagagctttattaaaatcaagatcacacagccaatagataactgagctataatcaaatccagggtttatctcttcttaaagtccgtgttatttctcacaagactgtccaataaaatcggttggggaagctttatggcaacactgggattgaaactagtattttatttcactgaggacgggctgtgacatcagcaatttttagaagctcagtaagtgagagtatcctgcagctaagatagaaacaactacaatggaacaattgtttctgtgagatatgcccttttataggataagatccagaatctgttgtcccagcatttgtttagacttctagcattttcttccttaaaaaatgactaagcctgctgttcacatcttcaattactggagtactgcttattgctaacagttctgttaatgagaaattgttcatccacagacaaagtaaaaatagactagctgtcacataagactggccatcaaaacattctctttaggattaagaaacttgccttatctcctgtctgcacagttgtctctcttcattccttcttctatttattgcttcacggacatgtttgtgatagaatggtactctgactcaaacagtttccagcaagggttgcccaggtgagaggagctgtttgcagaggtgatccctgactctttgttctttaatttatttcttcttttgcctgcctctctcatcttgttactaattgacatcactgtgttctgctatctgaggtttgttgatgccttttgcagccaataaaaatgtctttcattggcagagctgataaagaactagaagaatttttaataataactaagggctaataagggaaaacaattaaaatgatggtaaaataatagttttcaaattagaagtctgatcccataaatccacttgaaataagcaaatggcttaattttatgatctctgatattaatgccataaataggttgaatttatttaccatttatccagggttagttttgctaaacagtttgtattttagccagatatgcaacttttactgacaggacataatgaactttggagcctgcactgttagtgtagttgtaaggagataaaattggcaattatactcacagatggaatagaatttaatctatgacatttacttagctgtacagaaggatacaaggcaggagatacactgtcatagaatctttgtatcattggatggcccagaagcaaccaacatacagatttccacatgcctctcacccaaatgtgctccatatagctgctaggacaacggccaaaatcagtgtggtttacttgacatgaagaaattgcagcattaatttcccaccaatatttaataccattgttgtcacataggacaaaagactatatattgcctctctgccccactccccagttaatttaatagtagtcctacctagcaaacaagagtgacaagaaattctactattatcttaactcttaatcctaagaaaataagtttctatgttcattttcctaggcagcatcagattaacctagggttgatttaactttttctacacagagccaactagttttgggttaaaatctgatttttgcctttattagttttaggccactggaaaattattgaggctcagtattgctcacgtgtaaagtaaaaatatttacctcccactgctacttcaaggagtaagtaaaacctgtatgtatttggcccgtaatatgagcccagaaacagtagctaaagttatgtcaaataactggaatgttgtaaaaattaaatggtccctttatactcctgtagggaaaactgatctttccagttattttgcctgcctctagaataaatgctgactctccccaaattaaatacaggagtcctcccttattcattacagtttctgctacccatggtcaaccgtggtccttaaattgatgagtacagtacaattagatgatggtggggagggtgggcagggagaggtgagagtccacattcacgtaacttttattactgcatattgctataattgttctattagttattaatctttttctgtgcctaatttataagttaaattttatcataggtatgtatatgtatgggaaaaacagtatatatagggcctatttgtggtttcagacatctgctgtaggtcttggaacatatcccccgtggaaaagggggatctactgtcatttcccatttgaaatcttgctggtcttcctgtgaccttcccactcattctggttttctggtctgaggaatactgctggctcacagctggtgtactgggtggtaatctttgatatccttgagctccagagtctaatctagttttcataaaagatttatactatatcttaaattcctcagagtggttctctctctctttctctctctctctctctctctctctcacacacacacacacacacacacacacacacacacttgacagagagattgattcacagttgtcatggatacatggtagatttctagcaagtctcctgaaggctggttcatgatagtaccttataattgtcatagtatttgtaagacattagttagcacacttgcaaaagtataactaggttttctcttgtagtcattacgtcatatgacatcgtaaaagtggttgaattggttcccagactctcagaaaaactcaacttctgaagctgggagtaatacatacatagtaatattgatgtaatctggtgtgatatttattaaacattaagtgctgggcacattgcttgatattgtataatttcgttttatttctgcaaaaactctaggaggtagagactattattttggtcatttgcaactgaagagtttatgtaaattgcccacatcactcagctagtgagttggagttaagattccctacttgtaactactacagaatataatcttatggcagaatattcctctcttcttccatgaatattttctttgcattaactaaaaggttactcattttattacagggctaattgggtttgtttttaattggatgcacatccatcagttgattccaaatgttttgaaaataaatggaaaagttttataaactagagccagaataagagggatactgaattctttttactatgatgtttccttgagagaatcattaaataattaaagtagaaggatgtttacaaatcttgcaagtatgacattctatccaagccacactaaagttatcaaagggagacactcaccagttatgaaaatattcccctctactctttctcagttaactctaaaattagatggcaaaggcatcaaaacatctcactatctcaaatatttcctcagtgaggtcgtgatgtgaacatctcttatctagattgaaatcccaccttgagtcatatgtggattaaaaaaaaaagctattatctgagaaagtctaaataaaaagatacattttacctaggctttaatatctaagtttttctgtatagaatcagttgggcaagtgagtctcttggaaaagtgatttgaaaactgtttttattaataattggaatacacacacacacacacacacacacacacacacacactcttattcctcctcaagaggcaagagtacatggtgaagcccttaataaattcacctcactgtagttaaacagcagactatgatattgttgtagttgttaatcaaagggactctgaaaagagacagccagaagtggggaaaaaactagtatagaaaaataacgattgggcatttgagtatttggaaaaaacctggtgaagtaactaggttttaaaagactgaagagaaagacaaatttcacccattgcaaaatataacaacgatataaaaatgagacataagctcctggataaaaataaataatgtatttttttctctctattatatctcgaattttgctttcaccaacaaactgcatgtgaaatacgaaaaaagttaaaaaatatggaatattaagggactataagatgagaaatttttaaattgttataacctaagtaaaactgctaaagctagttgtagcgagatctgtcttacataaattttccattaaatgataatatctttgcattcatcataaacagaaatgtacattttaagcaaaatcattataatagaaatgataatactccttacctagccttcttcacgttaatcttaacatagactagtgaagaacatagcaaaggtagtgcttgaaggaatgttcttattgaaagaaatctttcctcagattgatcaagaggcattgaataatcataataattcaaactttaatcttgcagatggaatgaaaatgtttaaaattagaattattgtcagagcttaaatattgttacttacacaagccaaatacattaatattatgagcactattgttttagctaatgtgtcttttactctgcagagtacatatagactagtctaaaaggttttttttttttaatgcttttatagagcacgagcatttgtgcaggtggctgagtagactaagattttttccaatgggttgatttgaccacatcattaataaagtagaaattctggagcccctactttttattcttagtctgacattgtaaattctttcagatgctacataagcattttaaagttatgtgccccaggcttactttgttcagtagaaatgcatgttaattcatcaaatgtctattgataactttacataaggaatagtgctatatactccaagtgtgtcaggaagtaaaagatatacagtctgccaaggtattgaaaattgcatataggccaacaaacaatatataggtaactgttatataagacagaatgtgaactaattcagagaatattttttaaagtacagagcatgtttttcattctaataaatgtacaaatatttatgtcaaatgaaaatgtggctgcatcataattcttatatgggattttaaatataccaaaatccacggatccatacagtagttcttactctgcttccctaattttattagttggacataaatgcataaatcgataagatgattttggagcgggaacctaactttttctatagttccttggaagttaattgatttcttaagtgataaagtccaccactattttgagtaaggtttagttaatgatttctgtttaacatgtgtgatttctaataaaaagttctggatttattttctcttgttgaaagttgttcattagaactgacacctgagctaacataagcaaaagtcattgtaagtccacacgtttgcacagatgggtgtccccccaccatccttaggtttgagcaatggatttttacaagtgaaactcagtgcaattaatcacctccaacatgagaaaatgctctttaaactattttaagtcaacatttacaagagaaattggcctataatacacctcgggttcttaacctttttgagagctatagaaacgctgcttctctataaaggtaacatatattgccaataaaatacataagggaggacatctacttataaaactcagaaaacgatttaataggaacagttgttttattagccttctgctctttaatggctgagatcatcctggggctatttaaaaatgatttaatttgtcctctaaacacacagatgagttccaggtgtgtatttcccccccccacccccgctccatgaatcaaccatgtctgcactgacattaatagcttggatcgggaaatctctgtaataataaatctatcttttaagttggtcatttaagcagctttaagtatgaaaaaagtgaagtattagaactatttcaatccatgatgccttatagattatactttaagaatacgactgtgcctcactatctgagaactggttctaggaactccagatactaaaatctgtggatgcttaagttccttatataaatgatgtcatatttgcatataacctatgcacatcctcctgtttacattaaattatctctagattacttataatacctaatacaatataaatagtacgtaaatagttgttacattttattctttgtgtttaatttctaggttcagggttacacatgcatttttgttatatagataaattatgtgttacaggggctctgagtacagattactttgtcacccaggtaataagcatagtacccaacagggagatttctatcctgttaatttttattgtatttcctgaatatttttttatttgggaaacaatttattttttttggaaatttttgtgggtacatactaggggtgtgtgtgtatatatatggtatatatgtgtatatatatgtgtgtatatatataccatatatgtgtatatatatgtgtgtatatatataccatatatgtgtacatatatgtgtgtatatatggtgtatatataccatatatgtgtatatacgtatatacacatatgtgtatatacgtatacacgtatatacacatatgtgtatatgtatacatatatggtatatatgtgtgtatatgccatatatctatatatatggtatatatatatacatatatgtatatacatatggtgtgtgtgtatatatacaccatatatgtatatgtgtgtgtatatatacaccatatatgtatatgtgtgtgtatatatataaacacaccatatatgtatatatacgtgtgtgtgtatatatacacacaccatataggtatatatatgtgtgtgtgtatgtgtgtgtgtatataatttttgtgggtacatggggtgtttgtgtatatatgatatatatgtgtatatgtatatatatacgtgtgtgtgtatatatatatggtacgtgagatgttttgatagaggcatacaatatggaataagcacgtcatgagaatagcatgtcacctcaagcatttatcctttgagttataaactaattacactcttgaagttattttcaaatgcacaattattgactatattcaccctattgtatcaaatcagaggttatttgaatttgcagatacagaacccgcagatacggagggcccactgtatatcactaaatcattcatacctctccacctgtacaaccaccaccatagttcaagttattctcatctttttctgtgactgcaggaagaacttgacaatgactggccctattttctttctggatttaacttaattctcttttacacacaatcatctagcatgatatttacatagtttaaggccttagcacttgctgttccaactccctgggatgttgttcttccactctgcatttcacagctgaaccccagaaagattatgtcctttgttgatttaacccttctcagaatagcatgtgtctctgttactgcatacatattgaaactattcttagttttttgttttgttttgtgcttatgttatcacatactatacacaccaagtctgtaggctgtttttttgatattctagtgatttttaatgataatatttaatacatatatgagaaaagaacctttttaatgttaagggagagcatgatctgtgaaattatctgtctttaatttatctttggaaatgaacatttttcaaagttttcattagattgtattcaaaattggtttttattctaaaaaattaccatgttactatttcatatttaaatgcaactaggattagacaagcaacaataataatttttttcttacctgggagcctacatgaatactgagtgtattaagatatcaactgagatatcttgctatcttagtttgaggagaataccatatatttggggaaatagagagaaagtggagtgaacatgtaatttatgtctcttaaaggtgactcaaatgttctttatctgtatcttaaaatctttagtgagcattcttccttatgtttaggctagttttctctctgagataggtaaagtaagctactttgccttagtatgcggatgtatgtgtgtgcacgtactcatgtgcccatcttgtcaatacatggagagatggaataagacgaatgtagtatgtctggggtagaaatttggttgcaggagagaggctgacacattcacaagcagcagcaagggaagagggattactggagtagaggcaagggagaatttatttacttaattacataatacttatttagaatctacagtgttcccggtatattgagttatatatgagaatgcaagaaaatgacatcactagtttaaagatacaatgtcttctgtttttcaaatgtttcgttgattttgttttattcaatactgtttagtacaatattaacagagtaaacaacagtatgagtccttctcatgtttcactttgattgtatcattgatatttaatccaacgtaaaattcctaaccttcaaaaaataattctcacttaatgttccagtggagtttgttcccaccatagtactgctggcctatcacaatgctgtaggtagttgtagacttgttcagtcctgttattggtggtgacttcctcatgtgctgggacctttattattcacagctgaattcccagagcataagagtgccttttttttttttttttttctttttttgagacagaggctcgctccgtcgcccaggctggagtgcagtggcgcgatctcggctcactgcaagctccgcctcccgggttcacgctattctcctgcctcagcctcccgagtagctgggactacaggcgcctgccaccatgcccggctaatttttttattttttatttttttttattttttttttatttttagtagagacggggtttcactgtgttagccaggatggtctcgatctcctgacctcgtgatctgcccgcctcggcctctgaaagtgcgagtgcctgttttttaatgtacaacaaatgtttcttgaagacacggcttttacattagcatattacatgaaagtgtgagggtcattaatatgtgtgaagaccagttaggattttaaagttctgatcagatacgttatcaagctgatagattaaattaactgattaatccaaggaattaacattaacaagcaatgaaatggtcagtatccaagtattgaagttgtatttgggttttacctaatattttccttgatcttactggctactttgttgtctaagctgaagaaaggccttcctgattacctttatttaaataaaataacagtggtgaaggtaatttcaaaaaatattaactatgctaaaacatatacctgtggtttgatatacaagaagctgcagaaggttctcagaaatatgtaaaacaatttattcccaaggtaattgataattgtatgcattcttacagaataagctgttataaaatttcaaactttatctaaaactcaatagcacgtctcataaaatgaactaaatagttctgtcgggcataagaatgtcggcttctagtatagaattccatgtatggtacaaaagttgtagagagattgtgtaattgctacattcatcgtataattttagaaaaatcctcttggtaatttatatggtaaaaattgactgttacaattagaaacataaggcatattttgtctcaatggattttattgagtatgctaaagcaatacacactacatatcgggtaagtgtgtgtactatgaggggagaagtatatggatacacagatcatgatttctatgtaaaatttatatcaggcttgtatgggagaagatacatgacaagttaaaatataaaatgaccacataattaaagtataatttaaattgggattattataatttaaatattttcccaagaatatcttgaatagtaatctttaaaatttttctttttttgatttttttattatacttttagggtacatgtgcataacgtgcaggtttgttacatatgtatacatgtgccatgttggtgtgctgcacccattagctcgtcatttaacattaggtatatctcctaatgctatccctcccccatacccccaccccaccccaccccaccccaccacaggccgtatgcagccataaaaaaggatgagttcatgtcctttgtagggacatggatgaagctggaaaccatcattctcagcaaactatcgcaaggataaaaaaccaaacaccgcatgttctcactcataggtgggaattgaacaatgagaacacatggacacaggaagggggaacatctgtaaaatctaaaaataatttagtttcaaaagataactttaaaaatgtctaaatgctagtggtaaaaattaaatatgtagatgatttattaaacattttaaaaacctcatgaaaaagggaatgtgcgacaaaagactaatttgcagctatcaaaaaataggaacagaaaaaatgtgctagcatattaatataaatattaggtgtcattgtgtgtccgagcaacattgttatcagttcccatctagtaatgactctctgtgtgtgtgcagtaaaatcaataataaaggggatgaataggacgactttcatttgaaactaaatctcttggaattgtgtgagctactgtgccacctatcagtggaatgatgaaataattcatacatgaacaattagcttaaataatcagcttaatttagtcaaatttattacaggcaccagtttacaaaaataattggtgcccaagatatttaatacttgggaataccagaattagagtatatcggagacaaagtgaaatctggatactcaatatgatacgacttttttgtttaaacctgcatatttaaactctcctttggtagttggatgctggctccccaaggatactcatgtcgaaatccctagaacctgtgagtatagtacatgatacatgacacaggggaattaaggttgttaattagctgatcttaaaatagggagggagattaacctggattacctgagtgcacactatgtagtcaccggaatgcttaaaaatgaaagaggcacaagagtaggcctgagtgatataatttgagaaagactatacctactgttgttcgctttgaagaatggaggaagaccaggggttaaggaatattggaggtctataaaagctagaaaagggaaagaaacatgatctcttctagaatttccagaaaggaacaaagccctgctgttgcttgagtttagtctaataagactcatgtcagatgtctaacctactcagctgtaagataaaacatttgtcttgttttaagccattaagattttgggaatatgttacaacagtaattgaatactactgcactctctgtagttttttttctgttcagtttcttagctctggtctgttgtacttggctgttcagctttggggcctgacaaactgccctcaatggtagaagtccagcagtgctcatttctatagggttcgggacttgaatcacaaaaggcacgaagggaaaaactttttccctcaccctagacgaaagtccatattttttttttttttttttgcgaggatctgacattttaaaagatgtttagcagtagaaatccctactgttttcagggaatattatcctctacgcttcttacctggcacagtcatgggacaattacatcaacacacaatactttgtcctatatattctgtattatttttaattaacagcatcaactgacaaatctatgttgaaccatatgaagcccaggtctcacctacagtctcttttccagtaatattcagacatatatcagttttttagaattcttgctgggattgcttcttgtatggttaaatgaatgtgctcatgtgcatgggtatataattatgtgcatgcacacatggacgtgcgcacactgctggacatccaaaattgagcagcgatgtgcacagggcataagaatgtatacttgatacttaaaaggatttctaaaatttttacacagtaactgttgccatccttaagatagctctttccttaagtatgcaaaaacagttgggctgtttcaaatgcttatggaagcatctgaaatttccttgcagaagaatgtctttgttttaaatttacatgtctaaataccaattggaaaggtaaagatttgctcaatagaaaggagtaatctgttaaaagtttaaaaaataccgatttcttttggaaaactgcgaagtcctgaattcagaggtcttattcttgtttattctaatcaccccatctgaaggaagcataactttccccaatgactgaaataataacagtaagaatgagaatacatggaaaatgatattaaattcttaccataaacaatcttaaaatttttgctttgaggttaagttttctgagaaattccatacttgcttaaaatatgtttttacaaagtaataactgccattattatttacaacacattaagtactatcctagttatttcaattgcatcctcccattaatttcctagcttggtaggattccccccccaaccagaaaccaaacttaaaaactaggaacttccagtccagtctgtatccctagatgtaagattctgacctggataaattgataatgctgcgaaacaaagtgacctagaaatccagctaatcttatcagtgctcgtttttaattgagaaaatctaattactcagataattgtggagcgtgttgcatactcttaattactgtaaaaacaaaaaaaaaagacaaatttatgctgctatataggcctcacgccctataaaactggatatacttttttatgacccatttagcttcattcattttatcagtgcatagaatgcagtatgttttccttatttcatactattttgttttactttttgtaaccataaaacatcagctttcatgcacaagcatatttttggttggatgagtttgtttaattaattaagcatttgagaacatcagtggtttagttttgaggtgtcacaaatagaaaaacttagggaaaatttctcattgtattggaaacaatttattctgcattaataagttgatataatttggctctgtgtcccctacccaagtctcatctcaaattgtaatccccacgtgtagagggagggtcctggtgggaggtgattggatcagggaggcggttgtccccatgctcttcttgtgatagtgtgtgaatgctcatgtgatctgatggtttaaaagtatttgacagccttccccccgaccccactgccctgtgaagaaggtacttgcttccccttcaccttccaccatgattgtaagtttcctgggggcctccccacccatgtagaactgtgagtctattaatcctcttttacttataaattacccaaccacaggtactctttataacagtgtgaaaacagactaaaacagaaaattggtgcccagatagtggggcattgctataaatatagcaattatagaagtgactttggaactgggtaactggcagaggttggaacaatttggggggggggtcagaagaagacagaaagatgagggagagtttggaatttcccagagacttgttgaatggctttgaccacaatgttgatagtgatacggacaatgaagtccaggctgagatagtctcagatggagatgaggaacttgttgggaactggagtaaaagtgactcttgctatgctttagcaaagagattggtggcattttgccccttccctagacatctgtggaactttgaacttgagagatgatttagggtatctggcagaaatctgtaagcagcaaggcattcaagatgtgacttgactttttctgaaaacatacggttatatgcgttcacagagagattatctgaaatgggaacttttctttaaaaggaaagcagagcataaaagtttggaaaatttgcagcctgtccatgcggcagaaaagaaaaacccattttctagggagtaagtcaagcctgctgcagaaatttgcataagtaaagagaagcagaatgttagtagccaagacaatggggaaaacgtcttcagggtatgtcagagacctttgtgccagccccttccatcacaggcccagaggcctagaagggaaaaatggtttggtgggccaggcccaaggccccactgctctgtgcagccttgggacctggcttcctgtgtcctagctgcttcagctccagccttggctaaaaggggccaaggtacatcttgcaccattgcttcagagggtgcaagccccaagccttggcagcttccatgtggtgttctgcctacggctgtgcagaaggcaagaaatgaggtttgggaacctctgcctagatgtctagaggatgtatggaaacacctggatgttcaggtagaagtctgctgcaggggcggagtcctcatggagaacctctactagggcaatgcaggggggaaatgtggggttggagcccttccccccaccacagagtcctcactggggcactgcctagtggagccatgagaagaggcccaccatctagaccccagaatggtagatccactgacaacttgcaccatgcacttagaaaagctgcaggcactgtgaaagccatgggggctgtgctctgcagagccacaggcgtggagctgtccaaggtcatgggagcccaccccttgcatcagcctgccctggatatgagacatggagtcaaggcagatttgggagctttaagatttaacgattgcctggctgcatttcaaacttgcgtgggacctgtgtctactttgctttgaccagtttcccccatttagaatggaaacatttacccaatacttatacctgcattgtaccttggaagtaactagcttgcttttggttttacaggcttgtaggcagagagaacttgccttgtctcagatgaaactttggacttggaattttgacttaatgccgaaatgagttaagactttgcgagactgttgggaaggcatgactgtgttttgaaatgtgatgacatgaggcttgggaggggccgggagcagaatgatatggtttggctatgtgtacccacccaaattttgtctcaaattgtaatccccacgtgtcaagggagggaactggtgggatattggatcatttgggggatgggggatgggtggttcccctatgctgcactcatgatagttctcacaagttctgatggtttaagtgtctggctgttccctgccccctcctgccacctagtgaagagagtgcttgcttcccctttgcctttcaccatgattttaactttcctgaggcttccccagccatgcggaactgtgaatcaattaaacctctttctttctaaattacccagtctcaggtattccttatggcagtgtgaaaatggactaatacataagtatactaagtgatagaactacctagaaagaataaatccagattaacttaagatgctcttggaatcagtgtttcagtgtaattgactgtggacttaaacagctttaatggagaagttgcatcttacgaattgtttctttccctccggtcttagtcccattacttgaaagaaggggtacttggtaaatgttgattacgttattaaaaatattttaacttatttttagtaaaattgaataactctcttatattacaatcgtggaacccttgccctttagcaggccatttctcctaaggaatttcagacatccctaatcttaacatctttatataatgtacatactgttgtgcgagtgtatctttctaggggcccatttatcttaaaccgactttcctatgttcctatcatttaatgtgtttttccattggtaatgatatatttcttctgttccaggatgggccagatatcagatatcacacattgcaagtgtaaactaaagcccagagcagaaattcaaatggaattaaagtataaataaaaatataggtcagacagaatatggataggttgtaggaatagatcagatgccagatgtagattttaaaaaacatgttcagaaaatatagtattgaaaactaagaaagagcactccagaggagctttaaaaaaggagagcgagagaaagaaaaataatagaaaataaaactggaggacattgttaagtgaaatcaaccaggcacagagacacaaatattgcaagttctcactcatatgtgggagctaaagtaaattgaactcatggagatagagagtgggatgatggttaccagatgctgagaagggtaagtggggaggacaggataaggagggagtggtaaataggtaaaaaaaaaaaaaaaaataaaaagtatatagttagatagaaggaatcagatctagtgtttggtagcaccctagagtgattatagttaccaataatttatatttcaaaataatagttaaattggaatttagctaacataaatgataaatgcttgaggtgatggatgccctaatttccctgatttatcattacatgttgtattcatgtatcaaaatatcccatgcaccccaaatgtacaactattatgtagtcataataactaaaataattaacgaaaatgaacctcatctaataattggacatttctctcgctagctataaataccaggctttcagtcagctctacttttagtttatgaatgaataccatagaaacacctgtaatgtcctccagtcaaaggtgttgatcacccaaagctgagcttgttaaatttacagggaaagggtaagcaccaccttcagggaatagtcatagcctctcagaagaggagcatgacggaaggatacttaagagttttacacgctgagctggatggttctaagtatgctctcgacagattggtcagaattagcttaccagatgagttgctgtgacagtctgtggtgttatcttggaacacatgagtttgcccgagtttctgtaaatctacttgagcttaaacaatttgatatgtttattttccccaaacgattttatgttagccatcacgggtaattatgcttggcataagggactcttgcttgatataggggggagtctgttgtatccgagttcttagatcatcctatattacatcctatattaactctttaggatacagggattgattagggagtgatatattagttcacttacatagggagaaatgatcaactcagaatatttttgtccctttaaaacgtctacctctatgtaagagtaaagagcataggctcttgagctgcactgtctttgaatcctagctctgctacctaccagatgtgtgaccttaaaaactttacacaagcaattagttcgtcagtttcctcatttgtgcaatgtggttaataataaatgggttaatgtatgttaaatacttcatatagtacagagtaaagactagttattgtaactcatgctattgctgatttttaaatgatgtttattttaattcaattgctgttcccccttgtaaacgtagaaagaaaaggttaggaaagggagatgtagaattctactaacaatgacttatattagtagttgggccaataggccctccaaaggagattcatcttgtgggatgtaagtgcatatagtagaatatgtcatgaattaataacggcattcaaaaatgaagcaaagacctgtttaaatgacctcagggagaaatcagaaacttttacagcagtatctgctttaggaaatagctagtgatttaccatttcaaattatgaatggccaaccaatgccctcatcagttaggcattgacagcccattcttctagttctatcttcttctgtaccggtttcaggtgtttccttctattactccttgaattggctatggcatagtcagagtatcaaaatcactggcttagttaggacctcctagtgctctatataaatatattggtatttttatctttttgacttggaatggtttcatttaacatgtaagatacttagatgttgagcccatccttgagaagaataatgtataaacctcaaagataaaacaaaatcctctcattcttgatcagtgcttttagtttgagcatgtcacttggattactgtgtctctggctctagcattaaaatagtcaacctctgaaatagcaaaagtggtacagaaactcgtatattttggagagtcatcacagggaatactatttagttatatttaaccaattgttgttatgcatctttcaggggtgagacactgaaaatattgcaaagacataatcacagcccttgatataatagtagtttgaaaaaagccgtattggggcacagaaggagtagtggcagagtgtgtgtgtgtgtgtgtgtgtattaacaaaatgggattagggaatttgtcaatgatgagatgacatttatgttttcacttgctgaaaactttagaaatctacttagtttgctaggtttgtagtggcttctgttttcatctgtagtagttacaccttaagtgtgacaaactttcatttacttaatcagtttcagtctttctaaggctggcatgatcactaaatgagaatagactcatcttaattttcacatggcttcaaaattatagaaatattaatccttccaaaaaatgtttagatgtagtccaaaagatttgtctgtggtctctgaaaagtgtttcactggagataaagctaatccagtttaaagtaactttgtaatcaaaattaatattgcatgcgctaatcataggctctccatgccttcacttctagtcagatccaggctcattgggagtcaagtgccagagaggtcctgcctcaggacctttgtacttgctgatcctttaatatggaaatgtgttttctccagagagtcatcacaggattcaactgcttatttcattcaactctatttttaaatgttcctgtagttgaaaggctttccctctctaaatcctctcttaagtagagccaacctctccatgccttttgttccctctctttaccttgctctatttttctttataggacttgccatgacctgattttgtgtagcatatttatttgtccttatttttatttctagtcctagaatttaagcttcataagttaaggactttgtacattttattcactgctatatctcctggtcctaaaacagtaggaacttaaatgtttaatgaaaaacataaatgaatgattaaattactaatagaatctgtattccctctccaaatgtacatttggtattgtactaatgtatataattttatgcaactcataaagtaatcgacatatttatattgctttcaaaattagcgccctcaaatacatttaggttagaaaaactaaaattaatacatcaattgatcatcaagcatagaaaaggaactccaagaacacgtaaacattttacatctaaggtcttactatacttttggtattaatgtatattgtattaaatcattgtaaatgtagttttctattccgaatagcaatactagaggaatttactttaaattctacattctctgctggatgatcccccaaaactgctgcccagataattacagttccctctcttagcttgtcttccagtctctaatttcctcctactttaaatcattgttcacatgccaccacaattagtgtttgaagatgacaggtctaagcatgtcattctcttgttaatacaaccccatgttctttctaaacaaaatccggctttctatgcctgccttttattgcttcccaccatgtgttctgtacccattcttaaactaaccttcagttacaccaaccttgggaatacatgttcctgaaccacaaaagggtttcctccatgtttttatcttacagaagtcacttaccttagtacttcatgcatagtctgtactaagtaagggtttattggtgatgactatgtgttcaatcttttaaaaactttgccactgtcctagaacttaaagatgactattccatgaagctggtttatatttcaaagataaaatgtcatatttattataagcctcctgtttttttttttttctggtttttcctggatagtaatgtttactcaatttactaataaaactagaatatatcacttggctataagctgtagtaccacagaatttgaggtgacacagaaaaattattcatctgctcttatatctttccaagggcatgattagtcttgatggcctggtgcaactgaattctattaattcttatttaaatcatcagaaacaaagtgtgatctcgtgtcactgaattagctaaacaaccttgctgctttaacacataagtgccaaaatagaaaggagcttaaaacaatagtttatatgtagcccaggtataagtccaatgtaggtgttccttattggtgactgatatggtttggctgtgtccccacccaaattgcatcttgaattcccacgtgttctgggagtggcccagtgggaggtaattgaatcatgggggcaggtctttcccgtgctgttttcttgatagtggtaagtctcgtgagatctgatggcttcataagggggagactccttgcacaagttaccttctcgtctgccaccatgtgagacatgcctttcgcattctgccatgattgtgaggccaccccagccacgtggaaccgtaaatgaattaaacgtctttcttttgtaaatcgtccagtctcggcaggtatttatcagcagtgtgaaaatggactaattacagtgactaatatttttctatatttttctgcctttgttgtggctctaccttcttcacagatgatgatgttttttgtttttttgttttttcatatagccattgaagagggggaagcaaatacagaaaagccacagtgacttcttagaagccttgtggtagaggtgatgcatatgtgctcccttcactttccacatgaaggggatgtgtgctcatgaaacatgtatatagccatgcctgtctacaaggataatgcagtggctggctgagtggctgcttctaagtgaaaaatctatactttaaaagctggagaaaggacatggttgtttgacagcctgtctctgccatagttaggaactatcagcttcataaataaaactatctggtggtcttctcaatggggagcttaattacctcaagtcaataagaggaaaatatccattagattcaattctatgttaagaaaatcgtggtcccagtgggattataatttctaaaatgaaggaatgtcagtaaatttaatggaaccttaagtataccatagaaaaaaatgatacattctgacattgaattttgttgatttaaataaatttattgtggtaaccatgctggttcccttcatgacatatgaatggggaattaaataatatacacaatgctttgctgaaaagtgttcaatttgtgttagatcagatacacttgtcttggtgacaaaattggcacaaagctttatgaaacccacgagtgggcaaagattgtatcagaaatatctaacggtataaagcaattttgtttttcattgttacgatattgacacatctccaagaaacacatccagggatgaatagctctattccccaaattctaaagacagcatctgacggaaatctaatttcagtcttgttattaaataagttttcttagtgtctgccatagtagacagtgtttgcaagatagcatattcattttttaacatatttttcttttgtgtgttataaataaaattaataaactgtcatattctactggtatccactgacgtttcttagttttactttaatctcaccattatgtaaattgactttgacagaatatttttagttgaaacattgctggaaattgaataaagttatgtgtgtgtgtaactcctgtgaaacactcaatgttatatctatatctcttatcaatagttaagcctttatgaaaataattgattctttagcatggtgtattgcacctttctcccaaacagagatttacagacacatagtagggtgtgtatatatatagatgagcatcaggtataacacataaatgcttatatatctaattggtgttgaggtctgaattaatgtatttttgaaagcatcggttcttgtgacagtagaatcaaatacttgcataatgttttatagactagttataatccttacaaaaatcctattgacaaaatagcattagcttaatattccagatgagaaaatgggctccaagtaattagatgctttgttcctgatcaaacactaagtggaaaaaaacccacctcattacaaaattttcttgttgaaagacttcagactgcctctaaaatagaggagagaagaaatagtctgacactctaaattggatataaacgtcagaattgggactataagtctagaaaaagtaagtatgtttaatggcacatatagaacttacagtcttaacaaatgaagctttttggtcaattttggagtatgatcttctataacacggaaaatcattttggggttttttttcctgaataattcataaatggagatggactaaagaaaatataaaggaaatagcataggaaaattttgtaaaaacttatttggatattttatgatttttctacatctgttttctaaattttacaccagggttccctttaaatggctacttttttggaaaagaaatctgagtatatacccatatgcaaatgagcctcaaaaaatactaggtgcctttagcttctgttaatatgaaattactaattcatgatgagaatattttattttaatgttagcggtgttgcttttggttggaagccaggtaaatgtaatcctattactatgcctataatgcggagtagttttgtttaatggtatgtattaatgcggcattggacagcttgaattgaatcagagaaatggtgttggcaagcattaaagactttaagagaatgcaaattttatatgcctctttttattgtaaattgacaatatataattgtataaatatatggcatacaaagtgatggtagaatttatgaatacaatgtggagtaattaaatcaagctagttaacatatctatcacctcaaagacttttgtggagagaacatttgaagtgtactctcttagcagcttcgaaatgagcaatactctattaactatattcatgctgtgcaatgcatttcaaattttcatcagaaaaatcagctttgaaagagtgtatgcaaaaattttataagcttctcagatgatatgatcttatatgtagaaaattctagagatttccacacaaaaaacctgctagaactaataaattaagcacaattgcagtaaataaaatcaatatacagaaataagttatattttatgcactaacagtgatgcagtccaaaaaggagattaaggaaacaattttatttaaaatagtaacaaaaagagtaaaatacttaggaattaaccaagaaggtggaagacttatacactgacaactacaaaacaatcctgaaagaaattaaacatttatttttataaataaatgaaaaggaaccccaggtttatgaaatggaacactcaatattgttgttgaggtatccgagttactcaaaacaaactacacattcagtgccatctctaagaaaatcccaattagtttttctgcagaaatagacaactctatcaaaaattcccatgtaatctcatggatccaggaatagttgaaacgatcttgaaaaaagaatgaagttgaagggtcatacgtcctgatttcaaaacttactacaaagctaccataatcaaaacactgtggtattggcttaaaaaaagggaatgtagaacaatagaatataatagccctgaagtaaactctactatatattgtcaaacaattttccataaggttgccaaggttttttaatgattttttaatgaagccacaaatgttgctaagaaactgaatatatacatttaaaataaatgaagttggactcttataaaatacacaaaaattaagtcaaaatggatcaggaagtaaacgtggccaaaagtacagaacttttagaagaaagcgtagacatttggaagaaaacataaacattagattgggcaattaaatatcttggatatgacactaaaagctcaggctacaacagaaaaattaggtaaattgaaatgcatcaacattaaaaacttctgtgcatgaatgaacaccatcagagtgaaaaggcaacttacggaatgggagaagatgtttgcgaatcatatattcaatagggaattaatatccagactgtgccaagaactcctatatgttagtccattcttgcattgctctaaagaaatatctgaaactgggtaaattataaagaaaagaggtttaattggctcacatttctgtaggctgtacaggaagcatgatgctggcatctgctcggcttctggggaggcctcaggaaacataaagcagaaagggaagggtgacctggcaggtcatatggtcagaacaggagcaagaggggtggagggagatgtcatacacttttaaacgaccagatttcataagaactctctatcacgagaatagtaccaagcggacagtactaaaccattcatcagaaatttgccccagtgatccaatcacctcccaccagacaccaactccaacattggggattacaattcaacatgagatttgagtggggacacagttaaattatatcatcgtagaattcaacaacagaaaaacagcaattaaaaaaatgaataaatgagttgatcagaaatttctctaaagtttggccagtaagaccatgagtagataatcgatatcgctgatcattagggaaatgcagataaatcccaaatgagatagcacttcacacccattaggatgatgattattttaaaacaccaaaaaaaaaaaaaaaaacccagaaaataaatatggttgaggatgtggaaaaatttgaacacttgtgaactgctggagggaatgtaaaaccttgcagtcactgtggaaacaaatatgttggtttctcaaaatatagaacgtagaattaccatgtgatccagcaattccacttctgggaatatactcaaaagaattgaaaaaaggaccttcaaaatatatttgtacacccatgtttatagcagcattattcatagtagcaaaagatggagcaactcaaatgtccatctgaagatgaatggataaacaaaatgtggtaaatgtatacagtagaatattattcagccttaagaaagttctgacacacattatagcatggatgaatcttgatgatgatatgctaaggggaaaaagccagatacaaaaggataacatatgattctatttgtatgagctatctagagcagtaaaatgcatagataaagtagaatggtggcctctagaagctgggggagagaaggtatggggagttatttaatggatatgaagttttttgggggaagataatttttggaggtggatggtggggatggtgacacaacaaggtaaatatacttaatgctgataaattgtatgcttataaatgattagaattatatgttttatgttatatatattttaccatgataaaaacctataagctttcttgtaaagttttagaaaatgtttggattcataagtgttggatgattgagttttatagtgtaaatttaatgtagttgtgctcaattgtcaattgtatgcctattgtctgtgagtatatattttccagattgttctctaaacataatttttaaccatttagttggaaaaaaaaaaaacctcaacttaaacccaaatggaattatgtagtccattcagtgcatactgtgaaatatattagtaacattttattcattttaaagattttcgttatcagtttaggaagaatgataattttataaatccatagcatactgttgttgtgtgcgggtaatactcattatttaggctgtttttaatttggggtcttttttaacagataatcaacaaacgttttttatttgcacacagtactcttagtatttcgttttgcttcagtaatagtaaatgaggctggggtttggagagcacgattgcttttggaaaagtcaatagagacatgtttttatcgctactgctttttttctatgttaattggaatttgacgtaaaattgattctgaaagatatcaaggtagacacttgaaatatagattggacaataaggttggtagaccattactgtgctttgaactagagtcattaatgtgattgtgaaaatttttactttgtatgttattcatcacttttctcccttagtggtgtttagagcatgatgagttgttactgtactgacaagtattagtctagtagtaatttctcataggctgacaagtgccaaaattcatcctcacatatgaatacactaaagcagacaaacactgttttcatctctgacactatctacagtttatcgtgatacattattttggcctacagggtcacaggcaaattatatttaatcactgctttaaactaaaacataactataaatatttttgcactctttaaatcagcataacaatccaatagacttcaagatcctgagataatatttaataacattaaaatgatttaaaagtataacgattgtattaaataattctgaataaacaatacttttgaatgaagaagattaattagcatgatcattatagaaatggtcctattaatacaaagatgtcaagagtcatttctggttcaagtcaattaagctacgttttaattgaaaaaagctgttcattgtgtacagcggtagcactcctgacatatcatataaatgaccccattaatgcaggagaaataaggtcaactgagacatttttactgaaaccaattatgttacattttaattgaaaaataaaagctgcttttattcaaaggaagcaccactgacactccatcatattccatagcctcctaatattgcagtaacttcctaagcagtctctcagttcttcgcattatacaaagttatctttttactacattaattaggtcatgtgttccctatttaacaccttctgaagactctacattgtacttagaaaaatgtctggagtctgaaagcagccagcaagaccctgtgtgatctgtcccctgcttgcttcttgatctcacttcacactggttcccttacttcaccaggctccggtcaagcaagaacatacttcttctccctctttatatagctgacaacttcctgccattcagtctgagccgaaaggtctcatcttcagaagaatcctttgcagtctaccatatgtaaaagagctctcctgatgagccctcccagccattcctgtatcctattcacacttcttgctttaaaatcatcatcattatctgaaattaccttgtttgattatctagcttatttcttctctgcttcccctactagaatgtttggtgtcaaggactttgtccgttggcttcagtactgtatagccagtagctaggagaatgccgaagagatggtaggtgaaaaatgtttgtggaatggataaataaatgaatagcaatagtacagaagtatgccatcttatttgttaataggtgaccatcggttgatagagtttcatttctcctgattgcttaactcagtaacactctcctgcaggagagctagtcaggactcagggtttttttgttttttttgattttttttttctttttttttctttttttgagacagagtcttgctctgtcacctagactggagtgcagtggtacgatctggcctcactgcaacctctgcctcctaggttcaaatgattcctcctgtctcagcctcccgagtagctgggattacaggcgcgtgcaactatgcctggctaattttttgtgtttttagtagagactgggtttcactgtgttagccagaatggtctcgatctccttaccttgtgatctgcccatctcggcctcccaaagtgctgggataacaagcatgagccaccatgcccagcccgaggactcaggtttaagtatgtgaacagatagttcagaagacgttataaactgttaatggaaagtctggaaggaacccagagatatgttttgtttgatctacaccttactacagatttgggtttctgttagcagatctagcagctctggggcaacattctgcaatggcaccatcctggtagtactgaggagtgctactctcctccctcaaagcgggcacattactgttcagtctggagctgcactcgccatacacacagtttatgtaactccactgacagactctgccactccagtcatttatggcatctgactttgattccacatggaaatctactgggtggacctgtcacatttaaagataatcatcatcatcattgtgtatgtgtgtgtataagttacattggccatttttctggggactgagtctgtctactccaaaagctgtgaaaatagtaatgattaaaagtcctcagactctatgattgtggaaattctttgtattctagaagcacacaattctaagacttctgagtgtctctcttcagtctcctgtgaagagcatcaccgatttatcactaaatgagcagattatatactggggatttagtgtagaatgtgccatacagtagctgtgcttcttgaagaaatccctggataggccaggtgggtttatggtaagagataaaattaaatagacgctgcaaaaaaaggagacaacattattaaagtcacaggaacaaatgacacttgtaaacatcttggacatgagttgataacatttaagtgtagtccaaagagttcaaataaaaaggcattgcaatcacttgagagagagagagaaataatgcccggagagtacatttgggctatattttagagaaaggccttgataggtagaaatagggaagaatagcattccaggtgaaatagcaaggcaaaagcaccaatgaagaagaaataagaggaaggcatattcaaggtatagaaaatcatgtcattatgtgaggtacaaaaagctatcgagtgtgcatttatatatgaggtatcatgctaggaacccaggatagctagatcaaaaggtatgcattaaagacattttgactaatttccaaatgatcataatgatgcctatatgcaacatcaatatatgaagtattcagtttcccattccttgcaagtaaacctgaatatgtttaacattatatcactctgttcttccctcctgcaaccataattcataagttattttcaccaattcattcaccaagcatttattgaacactatgtatcatgtctctgattggcactggggaaacaaatgtctctaatctcaagggacatacagtagaatgggagagagatacagttcctttaaattctggacctttccatttctcttctattttcaatagagcttgcagtcatggaaaatttattctctgtggcaacaaagtagggcagatatttgccctggaaggtgaagagagatagagaaggctttctgcctaacatttatcatgaggtactaacaaatatgacaattgaataatgctgttaaatactatgtggcatactgattccatttcacatacttatgtctcctctttttaatagaaggtagtgtaaaaagaagtcctgtgttacagtaatgtttcttttattatctaattgatccttgggtacgttacctaataattgggtatgtacatctccacatacatagcagtggaatagtaatagttggggggatttttgtgacatttaagaagaataattacaagagtcaaaagtataatataaacacaaaataggaactttccatttttcaatgcagatttattcagcatctttgcttctgattccatgtatttttctgcttcagaattctttttttatcctctatcttattttacagttaataatttcctgagggactactttctgagtggaaaattgttagaatcctgaagaaatgtatcacatgggcctgcctgggtcttcccccgccccccccccccccccaagaaaaacctgcatctgccttaaacataagatccagtagtcagtatgaaattcatcaagctaaagcttatctcgtctgtagttgtagctctctgaaactttaaaaaaggagttttaaactttgcatatctgaatttctgaggtagcattatatatgaaaccaaaaatatataaaataataagaaaattgctaaagaatcactttgtgaaatgatgaatccatttagcttagttcttctgtttggatatgatagccttattgccatagagaaattgaggtaaggcattaagagaacaagcaaacaattttgcagtaactaactcatctctcccatgttgccaggtgtgccgcatattgctgagcagtgaaaggattaagctaggaaagaaagtggggaaagtgctacctggaaatcagaatgaacattgaatatagaaatgcatctaagggggaatgagaaagagaagagtaaattaggtttttcttgagtcctgtctttgttacttccacattttgtctacaggattaagcattcagtgcctgataagtttagtattgtgccagaggaccccagagaaaaattagaaatgatcctttccttctagcaactttcagtgtaacttgagagtcaggactgaccaaaatagttcaataggtctgaagtaaaattatttgtgaagtagtaaatttcactttatagtgtatgaatgctgtagaaatatatgagagaaatcaacaagggctgtgatggaaaataggaaacatccagaagtagaagttgagctgaaacttaaagatagttagaattggataagataaaatgagtattcccagttgcaaaacaatgtgagagcatgtttcgaaatagagaagagggatgggcataggaaaaacatacagatgaagtaaaagagggcattttatcttttttatttttttcattttacatgtctgttttgtttgtggacgcctatttggtctcattgttctggctttgggagacaggcaggggatgctgcggagcacatggcccctatttgtggtcgttttgctccaggtgaaaataatagccaccctttattgaacacatcctgtgtttcaggcactgtgctaagctcttacactttgttatctcgtaatcttgagaatacctgtgtgagggcaaattgcagtaagagtaaatggggggtttgattccgaagtctgagattcttgcctttatgaccactgacagttaaggggcttgttacataattacaggaactcaagagtcttggtcgttgaataacaatggatcaagtgctgtgctgtgacccattattttatcaagtggatggaataaaacatgactactgtgttcatttggatgagtaggagaatgctgaactttgaaaggttatggaaggcaagcctgtagagaggtaccaaaatggcatgtagcaacacgcagggaggagaaagacctggatttaaatgcagtctctgccatctagagctgcgtgagcttgagaagtctgcatcatcttccctctctggcccctaaagctaaagaattaaaatgtatcaccactgctctctaagagttcagtttaagtgacagcaatagtcaagagtgtcagtttgagttttcccccaaagcaaagcctgacagaaagccatgattggctgattatcaaagaaactagtaagaaaactcaggaacatgtgggacctggaaaagtgagacaaggaagaaggaaaagctaataaagataacattgttgaactgatgaccataataggtaactgtacctcaaccttgcctgggacattatagaaccttatagaactgtcctcagaaatgtccctttgaaggacaatttattttcctccctcctcttcctcctcctcctcctgttgctagagctaggaagtgaaagggtgttaaccctctaacagcagaaacaggaactgcagcaaaaatgagagatgggttgatgggatacagtgcaaaatacaaagaggcatctactgttcaaaataaacctataaaggaatctgtattagtctgttctcatgctgctaataaaggcgtaccaaagactaggtaatttataaaggaaaggtttaattgactcatagttctacatggctggggaggcctcacaatcatggtggagggcaaatgagcagcaaagtcacatcttccatggagacaggcaagaagagaaagcatgttccgggaaactttcttgtataaaaccatcagatctcgtgagacgtattcactatcacgagaacagcatgggaaagacctgccgccatgattcagttacctcctaccaggtccctcccatgacatggtgggaattacgggagctacaattcaagatttgggggaagaaacaaccaaaccatatcagaatcgaaagaaaaattataaagtcaaagtagaggaaattctggagagccttgaaagttgggctaaaactagatagaatgtgtatgtctcaacattttctattatatccctgaatcatataacttgttaagaatggggttacacaaaatttcagttaggttggagagggaaattcaagagaactgttgggtgtatataacaagactatagttaatagcaatgtattgtatgcttgaaaatttcaaaaagaatagactttaaatgttctcacaagcatgtgaggtaatggatatatcaattggcttgattgagccatttttaaatgtatatgcctatcaagatatattgtatactataaatatataaaatttgtcatgttaagtaaattcgaaattagaaaaaaaatggagctaatctctttaagagttaaaccctgaattgtagggaatttcttgctgacgaagactaatttggtcttgaagagaatttcatgtcaccatgaacttatggcctgacttcaaaccagtgatgagctgtggagggatatagggcactttgctttccatcagatcctctcttaagctgttttgcatcacttaattctaactgtaaagttgggaaaatgtagatggggcaagtgacagcatatggtttgatatatacttgattgtatccataagaacatcctcttacctttttaataagtagcttggagtgcttcctgccaaggctttcaccagttatccagaagattaaaggctgaagtagtgattgtccttggaatgtccctctatctatgtgtagatctgtggttttattcatttgtttcccaaattgatccacaaggagattaatcttgtatttttttcctgatgacttttataaactagatgcgtaagacatataatattgacatcatatcaagttgcccatagggttatttaaatatttgaagagatgtgtttgttctcttacactctctgaatgcttttggtttttagcgattttattgtcatcaaaaaccatattcgactacacatttttctgacctactagacattcacatttagctttgggtactttgtcattgtagaagcaagtataaagtaatgaaatttatgattcaatcagaaaacaagtattgaagctgctgaaatatgacgttctcagctttatttcttctacgaaaagtccaggttaatgtttataaaatatttttaaacttttttgtctgttcaggactgaatttcttgttgagccggaatggtgagataattctttcttctgtggaacaaatgcattttaatgatagttacttatatgaaaatgttactaagatttaatttatgcgcttaatgctgcttaaaataaatgtattcaataacaaaacaaagccaatagccatagcacattaattattgaatagactttctgtagttactgcaactgaatgacaggtagtaagaccttaatatttgcaatcacaattgtattcttctttgccctagattaagcttgctgattacagtgcaatgaagaaaaattaattagtttgctccagtggagcagttaatatagcacaagcgaaacccataccctgcttcctcctgtaaccaacttgttttcacttactctgccttttgatacacaaccattttcttgatcacttcccaattgaggaaaagtttaattaagtagctaatactatttagaaaatatagtgctaaggaaaaaacatgttattaaattcaaaccattgatatttttattgctatttaacttatattttatacctggcaagcaaataattgaatattgtttgaaaatatttgtaattaagaactcaagaatatgaaaacatcattgagttataaaacatgtattactcctcaaagagcaaatattcctgtgttgggctgctcttagttggagtaaacacattacctgcccacagggaacttttcatctattagaattcagaatacatttcagggattcttaccaaaaagatttagaatacagctatatgaatttatagaaatattttaacttcagaaggattgtgtgctcacttccgtatcttcctttaagattttagtcatgttccgttttttgtgttttttttccttgtctgaagacaatatttttagaggagagaatttctttgaaattgatactgtaagtaaatttactgtatttacttagaactactcattcacccatacaaaaaaaaagttgagctttcattattgagctctcctcattatgttataaaggaaaaagacattgtccttatcatgggagacaagcagatacatgggcaattcttcagcaatgtgatgagtagggaaagacatacatgatgtgggaaatagtgttttacagtcaggtcatgcattgaaccaaaactcaggccgtaaggaaaggctttgaaggggcagtggtaacttacctgacatgtaaaggagccagatgaaaaggatgttgcaggcagagaagctgtaatgtacagagaactgaaggtaaaataaaatatcagcttatggcttggcaaacactatggggaaagaggcacagaagtcacaatgatagtgggagccatctgcacaatgatttaatggctagggtgttatgtacagttatgtgtcttgtatattgcatcatttctataacagtataaatgctattgagtataaattagatatttattgacctcatattttacagatttgccgtgaaaatttctgtatgtttaaatctgcgataagtttgttattgactcattcatctaaattaatagcttgttcttcagaaaagaagttttgagactggttgtgatggtctcatcaggttgaagagatcatacttttactgtggcacctattttttttttttaatggtttatttctatttgagtaaaacagtggctaaggttctatggtatcgggataagatggtgataagtgatctatatgacagagttggcagaggaattaataaccatattgacttgggagagtgagctctgtatatagaatacacattttagtcaggagggcagagtggtaaaagtctgagatcttgagatgcactgcttgggtttgaatcctagctgtattacttaaaagctgtgtggccctcagaaagttagtcatactgtgtttcagtttcctcatctgtaaaatggcgataattgtatccatctgataagattgttttgaaaatatttaagtttaacatgtatgtatgtagttacatacatgtaaaagtatttaaaaaggtgcttggtagatattaagtgaccagcaactctaaatattgttttattataattagtaagctaccacaggttctgtgctgctgaataattgatcaataccttacataacatcagcaaaggggtaattttcaattttgcagatggcacaaatctgggtggggggtcaaaatgaagatgagaatttttcatgataggctaaatcacggggtcaaaacccacaaaatagaattgagcagggtttggtaccttcttaattgcttgcttgctttattttcaatggcttgttatgtaacaccaaccatgtggtcaacttgctaggttatataaaggtgaataaggctcggttccttccctcaagaacatattaacatgtagacgcaagtacagaaagggagaactaacattgtattataaatattctaaaaatgctaaattaacagaaatatgatacaaagtatagtataatgtagtatttagaggagataatggtttcacactcctttgctctgacaaagcatcaagagtctttagttatttgtgtcagattttaagaaagccaattaaatgttatagaacacccacagctgagggaagaatttgtactgaagcttggttggagtatactccctgtgtggcttactatgagtggcagtgcagagggtttgtggtggtcaaataggaaatctttatgagtatgaaaaacaaatttctaaggtagactcaatgcaaagtcgaaccacatctggaagaactataaattccataaatgttcattaagcacctcctatgggcaaagtgttctgttaggcctgaatgaatttattgaagacataagaaaaggctcatgtcttggaatatattgtcttttgaggaataccagcataattatgattgtataatagtttaattttatttttgatgtgtactatttaaaattcagagtgctataaaaatagtaaatcagggaatctgtatctggaggaataagaaatgaagtctttttgaaggaagtgatatttagatggaagtctgggtactagcttgttgtggagaaggaagagggtaaaggcatgagggaggaaaatacaggtggggatggaaaggtgttctaagcagggagaagtcagtgcttgtgtattagtccgttttcatgctgctgataaagagatacctgagattgggtaatttatacagcaaaaagggtttaatagacttgcaattctatgtggatggggaagcctcacaatcatggtggaaggcaaggaggagtaagtcacattttacaggaatgacagagggcaaagaaagcttgtgcagggaaactccacttacaaagccatcagatctcgtgagactttcactaccacaagaacagcatgggaaagacctgtccccatgattcaattacctcccacagggatcctctgacaacatgtgggaattcaagatgagatttgggtggggactcagccaaaccatatcattccacccccggcccctcccaaatctcatatcctcacatttgaaaaccaatcttgccttcccaacagtgcaccaaagtctttactcattccctcattaactcaaaactccacagtccaaagtgtcatcctagataaggcaatttccttctgcctgtgagcctataaaatcaaaagcagattagttacttcctagatacagtggggttacaggcattgggtaaatatagcccttccaaataggagaaattgtccaaaacaaaggggcttcagggcacatgcaagtctgaaatccagcagggctgtcaaatcttaaagctccaaaatgatctcctttgactgcgtatctcacatccaggtcatgctgatgcaagagaggggttcacgtggtcttgggccactctgcccctgcggcttttcagggtacagcctccctcctggatgctttcatgagctggcattgattgtggctttcctcggtgtgtgttgcaagctgccagtggatctaccattctggggtctggaggacagtggccctcttttcatggctctaatagacagtgctctagtagggtctctgtgtgagggctctaaccccacatttttcttttgcactgccctagcagaggttctccatgagggccctgcccctacagcaaacttctacctgggcatccaggtttttccatacatcctctgaaatctaggcagaggttcccaaaccgcagttcttgacttctgtgcacctgcgggctcaacacgacgtggaagctgccaaggcttgggcttccgccctctgaagtaacagcccaagctgtacctcggccccttttagtcacagctggagtggctgggacacagggcaccaagtctctaggctgcacaccacagagggaccctgggcctagcccacaaaaccattttttcctcctaaactccagacatgtgatgggaggggctgccacaaaggtctctgacgtgccctggagacatttttctcattgtcttggtgattaacattcagttccttgttacttatacaaatttctgcagtgggcgtgaatttcttctcagaaagtgtgattttcttttttatcacattgtcaggctgtaatttttccaaacttttatgctctgtttcccttttaaaactgaatgccttaacaggacccaagtcacctcacgaatgctttgctgcttagaagtttctcccaccagataacgctaaatcacccctctcaagctcaaagttccctataactctagggcaggagcaaaatgctcccagtctctttgctaaaatataatgagtcacttttgttcgggctcccaacaagttgctcatctctatctgagaccatctcagcttggatttcattctctacatcattatcagcatcttggtcaaagctattcaagtctctaggaagtcccaaactttcccacattttcctgtcttctgagctctcaaactgttgcaacctctgcctgttacccagttccaaagttgcttccacattttcacgtgtcttttcagcagcaccccactctactggtaccaattcactgtattaatttgtttttatactgctgataaagtcatgccagagaatggataatttatacaggaaaaagagtttaatggacttagagttccacgtagctagggaagcttcacaatcatgctggaaggcaaggaagagcaagtcacgtcttacatggatggcagcagacagagagcttgtgtggggaaactcccccttacaaagccatcagattttgtgaaacttattcactatcatgagaacagcacgggaaatacctgaccccatgatccagttacctcccactgggtccttcctacaacatgtgggaattcatgatgatatttgggtgagggcacagccaaaccatatcagtaggtataagtaaaataggtgaagggtggagatcaatcagaggaaagcacaccaaataggaggacaagttctcaatccactgcaaggatttgatttgtagtttggctttcaggcctttaactgtcttcagcttggaagtggggtttcactgggtacccacccctatctgcctaggagtttggctctgcttcctgtcactgtcatatgcacttctctgtggtttccaaaacctgacacagggaagaaatacaatacaggtatctgatttatagcaatctgttataaattattgaatgaatatcatattttaaattcatacctgatagatattttgcacatttcttgatttacttctaaaataagtggatttctcttctttccaaatgtaaatcaaatttcgcctaacttcatatgaaacacgggaagtttttctcccttttgtcagaatttttaaatgtatttatattttaatctgaagaaactagctttctcaaggatggatagagtttgaaaatgatagacatgattcagttttctaactctaatgctatgctagttttcatagagtttatgattaacataaatgtagcaatatacatgattttccgttagggaaaaatctctgtttattcttaatgttgtaaatcacaagtcaataaacacttatgagtgtcttctatatatgtagaaatgtactaggtttcatgggtaaaagtgacaaataaggcaaggcgtctgttttttcatccaatggaaatggctcacaatcacatttcaaaaaagatcagtgaactgtatataactacctatgtcttaatatgaacaaattgtgattcattggttcatataacagctgcaattcctaatacctaacatcaaatcttttttgctatgtgtggtgttagccacataaattctcactattgattcaataatgagttttttggcttttaattgtgtgtcatttttttgttgtttacagacatgataattttacgtagttctgccttggtgtctacctcaattatcagagtcttaaagagattatagcaactgggaaccctaaaagccttcagcaaatcttggctttagccaggatcctcaaataatgtccaaacgtgttaagaacttgaaatattgaacatttccacttcatttccattcattctttccatttccttaggaaaattctaataagaaatgtaattcttaggagcagagagcaggggaagaaaacaggataatttataaactgtttaataaccttgtgagcaattgaatgttgaccatataaattctggataatatcattattgtactcaggttggctgttaaaaagtcataaaggaaagaattttaggcatctatttctagataactattaaaatggtgatcttatcattgcataccatttagctggggagacagaattgtatttaatgaaatgactcatttgttgtattggattcctgccaaattatttcatggtttgtcaaatgataatttcacaagtgtcagtgacaagatgttggacattagttttctcttttcctatctgctgagtcacagttctcaagggatggatattatagtgattcaatcacaccttagattttggcttacatttactaatcagtctagtaaatttggtaggggggaaatcgtgccatagcatataaaataatgagttccatttcctccccacattggcttctattttttgggttctgtatgtacctaggacctaatggggcacttgccacgtaggtccccaatgggagaaaaggttctgttaattactccatcacattaaacagtccagttagtacccatagaggtgaggaagaatgtgcttatgttttatgcttcaggcaaagtagctaatcagagagctgtgaacaattgtaaggaagtgacttgctgcctggttctctgcaatgactgatgacacagtctttttacatcacagaatgtgtaaaatttgttcacatgtataagctcttgttactttgagagggcaattctgggataatttggttgccatattatacttagtcaatccctatgtattgataatctgttttaatttgcatgttgatatacttactgacttacctaataccatcatttatggtttgagatatcattcttaatttccctttaataatacatgtaatgcatgggtttacctagccctaagactcatttcaaaatatattttctgaagttctgtagatgtaattattaaaatcacaaactttcaaactggactcataccccagctggctatggtacttaatgaaaattaaactttttgctcctcagttttcttatctgtataacaggattaaatgccccaccctcgcagttttccttttttctttttcttttcttttcttttcttttttttttttttgagacggagtcttgttctgtcacccagtctggagagtgcagtggcatgatcttggctcactgctaccgctgcctcccgggttcaagcaattctcctgcctcagcctccccgagtagctgggactacaggcatccgcaaccacacctggctaattcgtgtatttttagtagaaacggggttttgccatgttggccaggctggtctcgtacttctgtcctcaggtgatctgcctgcctcagcctcccaaagtgctgggattacaggtgtaagccaccacacctggcctacactttttctttaaggataaaagggaaatacgtgtattaccattgtgcttgtcatatagtaagtaccaaataaagagtagcttctaccattattaaaagctatcctggcttttttactattattaaaagttattcaaagcctacatatagaaggcatagctatatgcctttgtgtcacatgaatagtcaacttttctaattttttctgtggctgtgctttgctctcaaagtgtggcctgcatcagagtcatcagggaaggtggtggttaaaacggattcctccccggcatgttggctcacacctgtagtcccagcactttgggaggccaaggcaggcagatcccttcagcccaggagttccagacaagactgagaaacacagcaaaaaatacttaaaaaaaaaattagcgaggtgtggtagtgcaaacctgtagtcctaactattcgggacgctgaggcgggaggatcaggattgcttaaacacaggagtttgatgctacagtgagtgcatgatcatgccactgcactcgagcctggacaacagagtgagatcttgtttcaaatacagtaagtaagtaaataaataaacccagcaaaacacagatccctaggtctcactctcacgcttgattgagtatgtctaaggatgtgggcaagattctgcagccacaactgtctcccaggtgaggctgatggtactcgttctccaactaaagtttgagtagctttgccctggagtagctgtcccaaacaggttaatcctcagaattgcctgggaagatttaaaatatatttcccaaacataactgaatcaaaatttgaggagacattgtaaaaaatccatttgaaaattgttgcgcaaattagaggttctcaaacttgagtgcacatcagaattttctggaggccttgttaaaacagattgttgagatacggaatcaacctaagtgtccattaacagataaatgaatttaaaaatatggcatataaacacaatggaatattattcagccataaaaagaatgaaatcctgtaattggtggtaacatggatgagcctggatactgttaagtgaaataagtcgggcacgaagagataaatatcacaagttttcatatgttagagctaaaaagtttgatttcatagaagcaggcagtagaatagtggttagcagaagccggggagggtaagagggaggagagggaggaaagggacaagctagttaacagatacaaaatgataagctaaataggacggatatgtactagtgttctaaagcactgtaaggtaacttcagttaacagtaatttattgtgcatgtttaaatagctagaagagaggattttgaaacttcccaacacaaagaaatgacaaatatttgaggtaatggatatgataattagcctgatttgattattacatgttatattcatataggaaaatatcactctgtacctcctaaatatgcataattatgtgtcgattaaacattaaaaagaaaacacagatttctgggtctcactccctgagatactaaccaagtaagtctgggagagtcctgaaattcggtatttctaaaaaggtcccaggtgacgctgatgctggtctggatccacactttgagaaccatagcctgccctagaccactgcttcttaactcattttaaaattaaggatctgtgtgagattctgctggatggtgtagattttcttgaaaaataaaaaacgtgaacatagtttccatatactttccagtgttcatggatcccttgaagtatgtctatgattcttgtatgaaagcttgactccagatagaacgtctttgagtaacatatcccaggttaggaatggaattctctggggctatttgcaaatctgtctaaacatgggaatatgccagtaacattttactccattacccagagaacaggaccaagtcatgttattacctgtagaatgataagagactttcaattctaagaattatggcttatttttacaacttgttggaatatgatttgcagatttggtgaaaatggtagttacttccacaaagatgtttaacaatttaaaagttctagaagtttgtgtttcctactggctttattctttatttttactcttcaaatctagctgttcgctgtctttttcctgaaacatttttattaaggaaaatacagaattttgcagcttatcagtttaaacagaaaacatccctgaaaagtcttcgactatatgactacattacttatacaaatcgtgatcatagtgaaactgaattactttgtaaataaccatgattcattactataagcagggttttgaaattatgactacctcgagaaaacttttattaagaataaaaaagcaactatctcagctggaccaataatagaaacaccagtatattcactcgctttttatttctcaaagcacatttgtggcttgtagccaagaattcattgcattgaaggagtgtttgacaagcagtattgaagctgtaaacactttgaactcattacagtgtctcaccataggaacttaactgtcactgaagacaccctgtctgtgaaaccatcattcctacaattatttttacctttgcctgaaaatatgcttttgtgctttaaggtatttcaaaagacaagagaaagatggaagctaaggaggctatagggatttcctgagttctgtgagtgctgtgttgatacagaacaagatcagaaacttggatatatatgtttcaacttaaaatgctgattgatcatcatgacaatagttttatagagcatttgtatgggggtgaatgtttgaagttataaaaagcattgtaatgttactcattcatgggctgaacaaacatttcctctttctctttctctggctttcttgccaattacttttttcttgccaattacttttttcttgccaaaaacaactgagatcacccccttaagtccattttgaaacaaacttagcaaggagtggttgttagtctgcaataacaatctacatctcaaactcacatccttacagttgttgtgtaggtatcatagctgcgtgaaacagtgaagtgtaagattgtgtctacagtggtctggaaaatttgactcataatcacatgtagaatacagtcctttaagaactctcccaccccgcatcactgccctgaagataatgagccaatgatcctgatggtaatctcttctaaaatcatacgtatttgagaaaaattgtatcttttcggagactggtaatagtccagatgaaaagtgtttatatcctgaacctagagtattgacaaagcagatgaagaggattgattgggatggagaagattcattgatgggacttaaggaatgactagatatgacaggatagggaggtgaagtatgctaggatgatctgtatgataatgtcttacacaagtgaacagaagtccagtttaaataacgaggtttggagggagggagtaaagaagatggatttcatttttcttaggtctaatttaatgtgcttttggtaaaatgtctactaggccaccatgtatatgaatctgaaccttaaaaaggaggtttgagcagataggtgcacagtttttaatcattagcatatttaacagttgaaaccatgagagaatatgccttatgagaagaagacaccaagatcacacaatgctaggaagaccaaaaaggttgtggcagagaggtgggagggttgatcatgagaggaataattaagtactaaattccactgaaaacattaagtaagatgtgggttaaaatagtttattagatttggcaaattggaagttttgataatattcaaaagagcaactttggaggaatggcaaaaaaaaaaaaaattgtaagaatggttatccttcctagaagatggttgcagaaatgattcagaaatagcttgtaagtagagggtaactgaaaagccctgagtgtgcttactagctggtgagagagggtttaaagatgaatatgtgttccttaaatccattttgtgtgtttatgaggacagggtaaatagtctagctaaatcaccacaccctgccctgtgcctagcatagtttctatatatttattaggcaccaaatattttaggtatatatttttttatgtaaaatatatagggaactgtgtgaggccctggaagaaacacaatgtctattttcattgaaaaagagctacattggagagactaaccacccatcactcaatactattttatttagttgtataagtaatgggtgctatggcagtttatgacagacagacctgcccttatcttgggggaaccacagaatgctttacagaggaagccatttttaatgttctactgagagcaaaatagaacttcctcccattcctcacccactgaacacattccacagagttaaaaactctgctttccttccacggtcacttttcttggcattcagaaattattggaaactgtaactatgggttcagtgccaacaacattctaacactcatggttagaatcctaaccagaaagagtacaaataagggtcctttcttttttgattttggctcagatatcgatgttactaataatgataataaaataatagtttaaatttaccctgtctttatgattttcagaatacttcccccttctagtttatttgggatgagatgctagggaatatgagtaggaaaatgataaagtgagacaaagaaggaaggaaagtcaatgaagactacatttcaagagtttaaactgtggtggacaactggcgctcaatttgactggggacttgaagaaaattatgtggaacacacacctcagacttatcctttgaagagatgagaatgctaaggtatttatacaccaactcctgctggtcatctgttggcagatcccgggaggggctgtgcattcactccctagcatttttgatctattgcatgcactccggaagaacagactccagtaggcaaagagatgcaggagctggcaggtggaagttggaacaatgtccactgaaatgcgaaggactcagaggaagagacagggtatcatcagcaccagcctaatggggtttgaatctccattttgccatttactagcagtgtgatctctggcaacttacttatcctctcttggccttcgtttcttcatctgtaaaatggggatcataatagtatctacatcgtaggattgcagtgaggattaaataaattattcatgtaacaattttacagaagagaacatgaaaatttcgaaaagattacttacttgtcaaatatcacacatatgggaagcaggccaaagccttgattcttggccccagcctttttccttatacctactgcccaatgtctgtgttgccttgtatcttcataatttacttcccattttctcattgcttaggtctcattcctgattcttttgtcccatttactctcctctaaacccttgtgattgtccagatgagctttagcttgggtgtctgtgtatcccttctgaatatttcatgcttcggccttgcccagcagcttaaacttacactattaactcccggtcttctctacctcgcatttttcctcttacctatgaggcatcttgacctataatattttcacttccaccagctgagtctatctgtggcacatgattacttgtctgattccttgttctcatggaatccttaggcttctctgatgtattttatcctattggcattcacatcccagtgggcacgaagaatatttaataaaaacattggctttattttagaacggaataaacacatcattctttcctcctaaaaataaaagacatattagttggattgtgtcattactgtagagtgatacaagccagaagatgcagtgacaatatcagaatggtgtgttatctgttaccaaagggaatgggtggtagctgtgtaaccaggtcatcatagtggcatgaccatagccaagtgtacggcaccatagtcaagggcactgaacaggtcattagttgggattgagtcaagagttggaccatttgacatggaacacacattctaaaaatatattaagttggtgcaaaagtaatcacggtttttgccattactttcaatggcaagaaaatgcaattactgttgcaccaatctaatagtaacataaacatcaagcggcttcaacttttgcctaacaagtttatttaaaaggttctaggctagtcatgtttaaaatggaacagctttattgagatataatttatatgccatacaatcatctgtttaaagtatacaactcaatgtttttagtatattcacaggactatgcaaccaaatattgtgttggtattataccaattagagatatgacaaaagctttggaccctctcatgcacatttgtacaaacacaaaagaatttgcatatgataccagaaaattcatggacttctctgaagtccatttatatgcccagaagtactactcgttcagccaaactctatcttaaggcagctattaattctgtttgtacaatccagcagacagataaggttgttgatcgtcttatggactcatggatatcaccttaacgacaacaatatatgtgccaagtctggctcctaaagttttaggattttgtgtttaaaaagggggagaaaagctttagtatgtttcgaatcctaactgacagtgagtgacaaaggtttgaaaaaatatattgcagatgtgtgaacatctggaggctaattgtacatgtttaggtactccataatctcatgaaaacttttgacctagaaatgtcagcgctgttgccctctcaaagagtcatgattctttatcacatcgctttattgtaaaatggaagtacatttagtggcaatatccgtgtgattagctatgtccagtcatcagatttttcttgcgttattatgattattacagattctattacactatgacattgagcataaatcaccagcctccttctcggcacatacaagagtcacttattttctaaaggttaccaaatatactaacttgtttaaacaaacgtacacacacaccttcctatatctgggtaggtacagactcagataaatcttcatacaacagcatgctataatgaaaagaacttaagttttagagtcataaataacttgatttgaatccatgagtatatatttacttactgtataatctagggcatgttatgtaaacacttgagaattcaatgccaaccttgggataacaaattttacccagcaagtctatgagaaagatcatagaaataacgcatgggaagtacttaaaacagtgtcctacacatggatacagatcaagaggtagtaaatacactcacaaaatggtctaattaagaaagtcttccatgagtttatgccctccaaaagatgagattcgaggccaattttgtgtcataaactttatgcttttataatattcatttctattttatgattatataatgcttaaataataatatagtaaatattcatgtaaaattcttacaccgaaagataaatattgttaatatgttggtggtcattaacttctccttctctctgttctttctcctctcttatttatgtgacaatatatgatccttttttctgaggtttaatagtgattcccatgttttcctcttccatagataccataaatctgttgatacacatgttctctttaccatgaaatagatcccttctctgtaccatggcccctataaatcaggatacactacattatgcatctataagaataattctgatatctcagcgactcaaaagaatagaattttcttcccgccaaacttcatgtcactatagattggtaggcgtctcaactcattgtactcagctgaaggacctgggctgagagaagggtcatctcaatataaactttaagaacgcaagagaacatgtgaaagcacacgataacccgtaaagcttctgcttggaaatggcgcacatcacttctgttcacatttaatttgatgaagtaagtcacatggccatatcaaagtacaagtaggcagagtaaaagatactatcaggagcctggaataaaagaatggaactttggtgaatagacttaatggcaaccacatcccttaaaacaagggttctcaaacttgaacatgcatcagaataacctagaggtttgttaaaacagggagtgttgggatccaccccctgagtttctcatcctgtaggtctagagtacagccagagcggttgcacttctcacaaattcccagttgctgttgattctgatgtctgagaaccacactatgagaactgctgccctaaagtataaaagctcttctcttaagattccacaatggaaaacacttcaacagtggtactttcgactgtccatggtcacatttcaaccacatacttctcaagtttccaaatttatctcaatctccaaccactggtctgttaataatttcccaaaattgctgtattatttcttttcctctggtggaatttaattaaaatatctttcctacaaaccttttccaaatcattctaactagaagtattgcctataccttttccatagtagtatacacctttccaaagtgatcacatgctttgtattatggtaatcttacacttgtgtttttctcagtttcatgaactgttttcaagcgcactcatagaaatttacccaaaatgaatactaaaacacttaattttttattcctgattttgccacattagggtaaaagacttggccacatgttctaaatttaaatcactactcttgtctcagaagccatgtgaacagtagggaggacagcataggttctggagctggactgcctgggtcaaaactaaccttgccactttttagctgtgtaaacttgtgcaaatttcttaagatccctgagccttttcctcatctagaaaatgaaagtgagaattgtattcataccataggactgttacaagaattaaatgaattagttgatttgaaacatttagtgcaggacttggcaagttttgagccattataaccattataattgcaaaacatcctgaagttattctctatgcctgaagttacattttcttaatatccattttctccttaatcccttaaaagctgtcttctgcctcatttattctatcaaaactgtattctcaacagtcactaattatattctaattgaatttcagagtgaatttcacacctctccttttgaaagattcatttctatgaatttgggacagcttcctagtatgatattccatctataagtatatccatatcatctatatcgtataccttatctgctctgctaactctttccttgtgttattatggatgttctccaattctgttctgcagacgggtgacaagtgaacatgtagaagaagttttcagtctcctagttttacctccattcaattaactttaaaatctacattactagttctgctgtgtcaccggcagtccaagaaaagaaacctgatcagtttgtgaaaatagctaatatttaatatgagcttattatgtgccagctactttacctggagtttcttatttaagccttacaattgctttattaagggctaggaacttcacatgtacattaaaatgtagaagcaaactgttgaggagagaaaggaatttacccatattatacagataactaataggaagtagagattggatttgaatgaatccaggactgatgtcgaagcccagtgtcttaatgttattttgggatgtctgcatagatttttttttctttataagggagtgatgattttaaaagcaacaagacccaccttaggtaaagtccatcatccaaaaccaaactcagttttattcctgtgcctacgcaaccacattattggatgcctagaaaatgttcaaacttctaaccaagtcactggtaaccctctgtgattttggcttaatcaggtttattcatcagttttgcccatatttcacttgagctctagtctcattaccttaattacagcttcctgtatgtctataggcttttgcttctatagacccaatttatatggtatcaactctatatgaagccgtttttgaatctcctagtaatgctttaattttcctaaaattcctgttatatcaaatcagatttcttttttatttttttgtcagttataagtttattttttgtgagggcaaaaataaatttgttggataatgagtttgtgagtagtagatcaatttgttcacatattttgcaaaagttagagcttattactcattcatgtactattgatgtaacgcattagaagacagttaacattagttcctaattgcacctgaccaaaaggagctgtgggcctggcctatacaccttattgcgtgttcagcatcaactgatttagtgaagcagcaaaaagaaaaatggtgtgtgcagtattatctttctgccacagatacatgtttttaatttccaagtttccaatgcatcattcagttttatctaatgggaatgcagctgagagaagtttgtatcaacccaaaactacatgctaatatagtttagttttcaagacttgtggagtctttttttttaatggaataagatcatcagaaatcctggagcaagacagactggctgtggtctaccagcattgtagtaaaaacattggggaagttttataagacctaattattagaaaataccataaaatagtcattttcatagaaaaagctttcctttctttcctcacactaaatcacattactttgtgttcaaggtaaaatggagtttgaaatctggatgtaaataagaaaagatattattttattccaagtgaaacatgtattcacacttcacgtcttgaagcaccaggtggccatttgggctgagttttcaagaaaaaaaaaattatatagattttatgtccccccccttttgttgttgctgttggtggtggtggtggtgatttttattttttggtaaagataataacatatgaaacaattttcctgttaattaaaacttactctatttatgagcatgatattttaaagaaattttttatatataatgaatatttggatatatatgtggttaatggttattttaacaaacattttggtttgctgaaatttttaagtttttttttcttttattattatactttaagctttagggtacatgtgcacattgtgcaggttagttacatacgtatacatgtgccatgctggtgcgctgcacccactaactcgtcatctagcattagataaatctcccagtgctatccctaccccctccccccaccccaccacagtccccagagtgtggtgttccccttcctgtgtccatgtgttctcattgttcaattcccacctatgagtgagaatatgtggtgtttggttttttgttcttgcgatagtttactgagaatgatgatttccaatttcatccatgtccctacaaaggacatgaactcatcattttttatggccgcatagcattccatggtgtatatgtgccacattttcttaatccactctatcattgttggacatttgggttggttccaagtctttgctatcgtgaataatgccgcaataaacatacgtgtgcatgtgtctttatagcagcatgatttatagtcctatgggtatatacccagtaacgggatggctgggtcaaatgcgatttctagttctagatccctgaggaatggccacactgacttccacaatggttgaactagtttacagtcccaccaacagtgaaaaagtgttcctatttctccacatcctctccagcacctgttgtttcctgactttttaatgatcgccattctaactggtgtgagatggtatctcattgtggttttgatttgcatttctctgatgcccagtgatgatgagcattttttcatgtgtcttttggctgcataaatgtcttcttttgagaattgtctgttcatgtccttcgcccactttttgatggggttgtttgttttttcttgtaaatttgtttgagttcattgtagattctggatattagccctttgtcagatgagtaggttgcaaaaattttctcccattttgtaggttgcctgttcactctgatggtagtttcttttgttgtgcagaagctctttagtttaacgagatcccatttgtcagttctggcttttgttgccattgcttttggtgttttagacatgaagtccttgcccatgcctatgtcctgaatggtaatgcctaggttttcttccagggtttttatggttttaggtctaacgtttaagtttttaatccatgttgaattgatttttgtataaggtgtgaggaagggatccagtttcagctttctacatatggctagccagttttcctagcaccatttattaaatagggaatcctttccccattgcttgtttttctcaggtttgtcaaagatcagatagtggtagatatgcggcgttatttctgagggctctgttctgttccattgatctatatctctgttttggtaccagtaccatgctgttttggttactgcagccttgtagtatagtttgaagtcaggtagtgtgatgcctccagctttgttcttttggcttaggagtgacttggtgatgcgggctcttttttggttccatatcaactttaaagtagttttttccaattctgtgaagaaaggcattggtagcttgatggggatgacattgaatctgtaaattaccttgggcagtatggccattttcacgatattgattcttcctacccatgagcatggaatgttcttccatttgtttgtatcctcttttatttcattgagcagtggtttgtagttctcctcgaagaggtccttcacatcccttgtaagttggattcctaggtattttattctctttgaagcaattgtgaatgggagttcactcatgatttggctctctgcttgtctgttgttggtgtataagaatgcttgtgatttttgtacattgattttgtatcctgagactttgctgaagttccctatcagcttaaggagattttaggctgagacagtggggttttctagatatacaatcatgtcatctgcaaacagggtcaatttgactttctcttttcctaattgaataccctttatttccttctcctgcctaattgccctggccagaacttccaacactatgttgaataggagtggtgagagagggcatccctgtcttgtgccagttttcaaagggaatgcttccagtttttgcccattcagtatgatattggctgtgggtttgtcatagatagctcttattattttgaaatatgtcccgtcaatacctaatttactgagagtttttagcatgaagggttgttgaattttgtcaaaggccttttctgcatctatggagataatcatgtggtttttgtctttggctctgtttatatgctggattacatttattgatttgtgtatattgaaccagccttgcatcccagggatgaagcccacttgatcatggtggataagctttttgatgtgctgctggattcgttttgccagtattttattgaggatttttgcatcagtgttcatcaaggatattggtctaaaattctcttttttggttgtgtctctgccaggctttcgtatcaggatgatgctggcctcataaaatgagttagggaggattccctctttttctattgattggaatagtttcagaaggaatggtaccagttcctccttgtacctctggtcgaattcggctgtgaatccatctggtcctggactctttttggttggtaagctattgattattgccacaatttcagatcctgttattggtctattcagagattcaacttcttcctggtttagtcttgggagagtgtatgtgtgcaggaatttatccatttcttctagattttctagtttatttgcgtagaggtgtttgtagtattctctgatggtagtttgtatttctgtgggatcagtggtgatatcccctttatcattttttattgcatctatttgattcttctctctttttttctttattagtcttgctagcagtctatctattttgttgatcctttcaaaaaaccagctcctggattcattaattttttgaagggttttttgtgtctctatttccttcagttctgctctgattttagttatttcttgtcttctgctagcttttgaatgtgtttgctcttgcttttctagttcttttaattgtgatgttagggtgtcaattttggatctttcctgctttctcttgtgggcatttagtgctataaatttccctctacacactgctttgaatgtgtcccagagattctggtatgttgtgtctttgttctcattggtttcaaagaacatctttatttctgccttcatttcattatgcaccccgtagtcattcaggaggaggttgttcagtttccatgtagttgagcggttttgagtgagattcttaattctgagttctagtttgattgcactgtggtctgagagatagtttgttataatttctgttcttctacatttgctgaggagagctttacttccaagtatgtggtcagttgtggaataggtgtggtgtggtgctgaaaagaatgtatattctgttgatttggggtggagagttctgtagatgtctattaggtccacttggtgcagagctgagttcaattcctgggtatccttgttggctttctgtctcgttgatctgtctaatgttgacagtggggtgttaaagtctcccattattaatgtgtgggagtctaagtctctttgtaggtcactcaggacttgctttatgaatctgggtgctcctttgttgggtgcatatatatttaggatagttagctcttcctgttgaattgattcctttaccattatgtaatggccttctttgtctcttttgatctttgttggtttaaagtctgttttatcagagactaggattgcaacccctgcctttttttgttttccatttgcttggtagatcttcctccatccttttattttgagcctatgtgtgtctctgcacatgagatgggtttcctgaatacagctcactgatgggtcttgactctttatccaagttgccagtctgtgtcttttagttggagcatttagcccatttacatttaaggttaatattgttatgtgtgaatttgatcctgtcattatgatgttagctggtgattttgctcgttagttgatgcagtttcttcctagtctcaatggtctttacattttggcatgattttgcagcggctggtaccggttgttcctttccatgtttagcgcttccttcaggagctcttttagggcaggcctggtggtgacaaaatctctcagcatttgcttgtctgtagagtattttatttctcctttacttatgaagcttagtttgcctggatgtgaaattctgggttgaaaattcttttctttaagaatgttgaatattggcccccactctcttctggcttgtagggtgtctgccgagagatccgctgttagtgtgatgggcttccctttgagggtaacccgacctttctctctggctgcccttaacactttttccttcatttcaactttggtgaatctgacaattatgtgtcttggagttgctcttctcgaggagtatctttgtggcattctctgtatttcctgaatctgaatgttggcctgccttgctagattggggaagttctcctggataatatcctgcagagtgttttccaaattggttccattctccccatcactttcaggtacaccaatcagacgtagatttggtcttttcacatagtcccatatttcttggaggctttgctcatttctttttattctttttcctctaaacttcccttctcggttcatttcattaatttcatcttccatcactgataccctttcttccagttgatcgcatcggctcctgaggcttctgcattcttcacgtacttctctagccttggttttcagctccatcagctcctttaagcacttctctgtaatggttattctacttatacattcttctaaatgtttttcaaagttttcaacttctttgcctttggtttgaatgtcctcccgtagctcagagtaatttgatcgtctgaagccttcttctctcagctcgtcaaagtcatcctctctccagctttgttccgttgctagtgaggaactgtgttcctttggaggaggagaggtgctctgctttttagagtttccagtttttctgctctgtttcttccccatctttgtggttttatctacttttggactttgatgatggtgacgtccagatgggttttttgtgtggatgtcctttctgtttgttagttttccttctaacagacaggaccctcagctgcaggtctgttggagtaccctgccgtgtgaggtgtcagtatgccccttttggggagtgcctcccagttagggtgctcgggggtcaggggtcaggcacccacttgaggaggcagtctgccccttctcagatctccagctgcgtactgggagaaccactgctctcttcaaagctgtcagacagggatatttaaatctgcagaggttactgctgtctttttgtttgtctgtgccctgccctcagaggtggagcctacagaggcaggcaggcctccttgagttgtggtgggctccacccagttcaagcttcccagctgctttgtttacctaatcaagcctaggcaatggcgggtgcccctcccccagccttgctgccaccttgcagtttgatctcagactgctgtgctagcaatcagcgagattccgttggggtaggaccctccgagccagatgcaggatataatctcctggtgtgccgttttttaagcccgtcggaaacacgcagtattcgggtgggtgtgacccgattttccaggtgctgtccgtcacccctttctttgactaggaaagggaactccctgaccccttgcacttcccgagtgaggcaatgcctcaccctgcttcgggtcgcgcacggtgcacgcacccactgagctgcgcccactgtctggcactccctagtgagatgaacctggtacctcagatggaaatgcagaaatcacccgtcttctgcgtcgctcactctgggagctgtagaccggagctgttcctattcggccatcttggctcctcctctcaaatcagatttctgatccaatatttcaagttttaattttcccactggtaggctctattcctactctttttctgctcatggctgaaaattttctgtatctcccatctctttcatatttgaatctattgaatacatagcctccacactcttaataaaatactaatttcatcatgtaacttcattattcaaaatatttagtggctcccactacctatattaaagattccaaactcagtagttactaatatttttcataggctttctagtcctgtcctttcttttagtcttatctcttactactttaagcttattcctagggcaaacatcttactatttccaaaatgtgattcaacgtcattcctattgcctaggaagacactcttctgtcctatggctctctaagtctacttcctgttgaagtactctttttcataaacattcaaattgtttttgtgtcctactttggtgttacctgacatattttaaaactcatggattggatcacatatctatgcatttacttatggcaccattacattttatttattttaagagacaagatattactcttttgcccaggctggagtgcactagcacagtcgtagcttaccacaggcctccaactcctgagtcaagtgatccttctagctcagcctcctgagtaactagaattgcaggtgtacaacacaatgcagaggtacatttaaacaattttttattgttattttgtagagacagggtcttgcttcattgccccggttggtctcaaactcctggcctcaagcgatcctcctgcctcagcctccgaaaatgctgagattaggaatgtgaaccattgtgcctggcccacgttacattttaacagtggggatctgaacactgcagtttcccaaagccaaaaacatgactaactcagctataaatatttaaccaactcttaagtatacctcctggaccatggtcatatagagcagaggctgtgctactatatatgctttagttttgctagtacatttagaaaattgtttattacatagtcagtactatggtgaatggttaagatatgttgaatgccctgctgagacaacgtttttactttgataggaaagtcaaaagaataacacacatatttaattattaaagaaccagaacatgtagttttctgaatttcttagtataaaaagctccttaagagacataagtatacaaatatacacttcttcatctatgatactctattaaatttggcatatttctttttaacaaaaacttacaagggtagaaatctgctgagatgatatatgaaatgtggaaatgttaaagatagattgggggggtggttaagataagacattgaagcatataatactcctcttggagaatcattcagcttgccaagctaccatgaatcagtgtttgaaaagaggcagaagatacatacatagaaaaatcagccaaaatattcattaacatgaaatgtttccaaagctgaagtgctacattaatggttgactttgtgcctcaagactaaatattgggcaatgttagctttccctataataaaacttgccccaaaatatatgttgagtatcccttatccaaaatgcttgggaccagaagtgttttggattttggatattttcagtttggaatatctttattatacatacgagttgagcatccataatctgaaaatctgaaatccgaaatgattcaataaggatttcccttaaaaatgatcgtgtagttactcaaaaaattacagattttgtagcatttcagatttcaaattttcctattagggatgttcaacctgtattgaacttacttgcttacacgtgttgcccgtttgctgtactgtaagctctgtgaaaaaagtatctgctgacttctttgttcataattgcgccctagcaccttttgtggtagttggaaaatggtagacactgagtaaatatttactaaatgagtggataggtaaaagtatttcagtttggcatggcaagatggaaagactaacagtgtttaagtggctatggccaacgtcaggccttcttcagtttaagaactgtggaaagaagaaaattaaacaattaaggaaagataagaataaatccaacaggaagttctcactgaagccaagagattcaaaaaaatacaggaagaagaagaggaagaaaatactattttctatgcattatattcccaaagatatctgccttactgattaatatcaattaataccataactatcacattttctcataggccaaggtgaaatgtctgataagacaagctttgttgctaacacaatttaactcactttagaatattaacatgacatttatgtggtctactcctctctaagctcaaataaagcagctgcgtataaaaagcagccatggattaaatgacttcagcctgctttgtggaaactactgctgttaaacctgctcttgataaactacaaagagtgcctggactccatttatgaaaagacatttgaatatagacctcacatggtgatcatttaaaaatattatattttgcctgtattacaacattgggttgtatttttgtttaaatctctacttcatttacttatgcgtgtaatactgacttgcttcacaaaatgttactctggagtgtctggcaagcttcctaacaagaaatttgaaagcagttttacatgaaaatcacatttttgaattttatatttctagacaagttttagtacaagcagtgtaagagcataagagtagtctatgtcatatgctatttgtcagtctccaatgaagagtaaacatttatcagcttcagtaacaatccctgcctaactgaggagtgtcattttctgaaaatattgattgatagaggccttgcctaaaaaatataaaatgcatgtaatttacacacagctgagaaatacaagctcattttttcctgacaagcagtaatgccctttataaactatggagattaaattacaaaaaaagttaaattaaaaacaaaagtatgatcagagtgatcagagttttgtgtggtacattttctagtaatcatgttttacagcagtctaatttggtaaataaaagtgaattggaatatattttaaaggctaatatgtatatgtgtgtatgtgtatgtatatacatgtatatgtgtgtatatatacatcatagaaacctttatatttaagagaaaatcatcaacaaatacttttaacacatttgttgttatgacgcagtaacatgtatcctaaattaggaaagtcatgtttccggatattttcctaaggaaatattggttctaaaaattcagcataggaacgtcaagtattttattattcactgaagggaccaataatatcaatgcaagcagaggcctgatatagaaaaattaattaaggtgattatagaggtgtaagcaggactctagtaaatgaatttagaaggtggtctagtcagttgcttgaacattaatcagaatttagagttctgctctgttataaactcaatggtctcgtgaaaccatttttatacaagtctcaatgaattcatctctatatagttcttgttccacctactttagtattttttgaggagcaaatgagataatgtgtgcgaacataagacacaatgtgtaatctaagccaatctgggcagattaccttctctagtgcagattagagatatctatgcattcactaactgaatttttgtaccagttggaagtgtttctgaagcagatcttttttttgctagtctattataattattaaagatgatatcatgcctaaaatttgtcacattaaagaagcatcagtatctttgtaacattcacacattgattttacttcaacctagaggaaccatgactgcctttaaccatttgaaaaggtctttatgaatctaccatctccaagatgaatacccacagcctttattattgggctcacttttggtgtcctttatcgtcatggtagtcatagctcctacatctagtaaacgttaggcctagaatttgaattgccttgattctcaaataatatctgaatccatcatcttatatatttataatttctttgaatatgtgataattaattcagggtaattagcacatccaatgtctgtgtgtagaaacattgtgttggaccccataaatatgtataattatcatgtcagtcataaataataaaaaaaacttcccacaaataatttataaacccatgcagtccttataactgctctttccaatattaatttcagacttaaaggtgatctgttaaattttatcttactggtttcgatattattatagctaagacatccatagctgaattttattacaaagagtaaaagctaccctttccaggagagtaaaatattttattataatagctgtatttttatgccttaagatccaagatcattggcaaggtatatttggtggaagcagtccaaatgagagtcacatgaccatcaagtagatataactttaaactgacacaaggccatttgccatcactttttggatagggtgtgctgccacatgtgtgtttttaaaatactatattttagtacagattcaaaattttgtctgtgaatttattatgggagacattgataagctacattgtgaatatgaccttatctatcgaactaataatatgatcaaaagagaaaatgacatttgttcatgggttgatttgctaaccccgcagtgtcataaatagtttatagtagtgtcattgcctccatagaaagttaagattgcgtagattcttcagctgtaataaatttgtaacatatatattggataaaagtatatgagaatgttcaaaacattatttagattaagagatatacctattagaaattgcatatattccaggggaattttttaaatttttgtgggtacatagtttgtatgtgtatatatgtatagaaagagagagacagtacatgagatactttgataaaggcatgcagtaaataataatcacatggagaatggggtatccatccactcaagcatttatcctttgtgttataaacaatccaatgatactgagttattataaaatgtacagttaaattattgagtatagtcaccttgctgtgctcgcaaatactatgttttattctttctaaggaatttttgtacccattaaccaaccccagcttacctccaccccctagtaccctactcagcctttgagttgagatctctctctctctttagctctaataatatttgctttatttatctgggtgctccagtgttgggtgcctaaatatttgcaattgttgtatccttttgctgaattgacccctttctcattatataatgaccttttttgactctttgtttttgtcttgaaatctgttctgtctgaaaaaagtacagccactcctgctgttttttggtttccattggcatggaatatcttttttcatccattttcagcccatgtgtatctttataggcggtcattaaagatgtcaagtattttgtagaatcatagcatgtatataaacacatgcatgcatatacatatatatacctatggactacaatattatagataaaatttcataagtgactatgatccatgatatgagaggcagagaatgctcagcagtgggatccctctctcaagccatactgtcaaatctagtatattgaaatttctggaacacccttatatattagagtctttaccagaaatgctggtacgtttattttaactgttattgcagaaatggctaagaaaacaatgtctagattctaaagcaaggattaggattgtatactttcttctgttgtgttacacagatacaaccaaacaatgactatttattaagtactatctgtggctaaggtgttgtacttgaggctgtgttatttacgcactaagctgttaaagtttatttgatgtttactagagctttctgatgccaagaacacaactctggttttggtagctctcttttttccattgtttaaaaatgctaaagatcatgcaaataattaacatatgataaacattttttaatctcagtaacattgtaaatttataatatgatgagaaaaagagctgaaagattactgatgtaatttataacaggttagtatttttagttcatcattataaacccagaagagaagagctaataaagttattcagttgtgcttatgtaaatcttttggatcttgagacttatttaatgactggatgaagattttaagtgccatgggatatgtgagctacatggttcaactgtacaattggatcactgttcattttatgggctgtgatatacttcacattgggttgatttattgtttcagagtaaaattagctttaacatgttttcttcctaactgaattgtaaatcaattatgttaacagctcctcttggtaagggcctagacaaaatacatatggtcaataaccattttgtgtgaaataagcatataaaaagcagactttagtagactactctagatttgcatagttcctcataaatcaactttatgaaaatgataagaactgaacagaaatttatttgaagaatttgagccataacagccttataaattaggttcacttcacctattttattcacctcgtttagtttcagcaaaaaagtctgatttaatttagagtttattattacttttgattttaaatgcacaattcttaattgtatatttatacattccagttggaccaattttttgaaaggatttcctcaagaagtagaattgcaccatttaaatgtattatatttgacttgtcaactgtcgaatctaattgtcatcatttgaaatacaacaatatgtgctaattattttagttttagtttttattcttttactggatgtacttaaggcaaccttgtccaactcacagcccatgggctacatgtggcccaggacagctttgaatgcagcctaactgtaattcacccactttcttaaaacattatgagatttttttgcaggtttttttttttagttgattagctattgttagtgttagtgtattttaggtgtggcctaagataattattcttcaaatggagcctaaggaagccaaaagattacatacccctgatttaaggggtacaagatgttacgatatacatagacataatgaaatgattactgaattcaaccaaattatcctatccattatcttccataataactgttttggtatggtaagaatacctaaagtctcttttcttagctaatgttcagtgtacaatacaatgccattaactgtagtcatcatactaagcagttatcgagatttatttatccaatataacttcaagtttgtgtcctttgacctacttctcctcatttcttccaaacatttaaagagtaatttataccatttgttcttaaaatcttctaaataatagaagaggaaatacctccaaagccatttatgacttcagcatcaccctaaatacgaaagtcaaacagacaccgcaagagaagaaaatatatatatgccaatatctaggaggaatatagatgtgaaagtcctcaataaagtattagcaagacaaataacacattggattataaaccgtgaccaggtgggtttagccctaggacacaaggttggtttaacatacacaaatcaatcaatgcgacatactacattaacagaaagatgaaaaaccacatgattatctcaatacatgcagaaaaagcatttgataaagctaaacatccttttattattataactcttcgcaaaatatgtatggaaggaaatttcctcaacatcaaggctatttatgaaaagcctatagctaatatgatcaacggtggttgtggggtggttgtactgaaagctttccccttaagatttgctaaaaagcaaggatgcccactcttaccacttccatttgtcatagtaccaaaaatactagcaggagcagtgagacaaaattaataaaaggctttcacatctgaaaggaagaagtaatattatttctgtttgcaaatggtatgatcgtatatgtagaaacccctaaggactccacaagaaaaatgttagaactaataaatgagttcagtaagtagtggaatacaaaatcaacataaaattagttgcatttttatgcaaaagatatccaaaaaattttaaaaaattctatttatgataacatagaataaaatatttaagacccaatttaaagaagaaagtgaaaaatacgtacaaccaaaactataaaacattgaggaacaaattaaaaggtaaatatatgggaaaatatcccatgtttgtagactggaagaagtaatattgttaaaatttccatactacccaaatggatatatagctgtcccttggtatccacgggacatgggttccaggatgccagtggataccaaaatccaaagatgcttaaatcccttatacaaaatggcatagtatttgcatatacctatgcacacccccctatatactttaaaacatctatcgattatttgttattacacctaatacaatgtaaatgctatagaaatagttgttaccatatattatttttacttgtattaatattttttgttgttgtattgagttttttgttctatttttgattatttctggtctacagttgcatccgtggaaatagaaggttgactgtacaaatttaatgtaatccctgtgaaaatctaaatggcattttttttcacagaaataaaagagcattataaaacttacatgaaatcccaaatagccagaacaatcttgaggaaaaaaaagttggaaatactgctctttggatttgaaattatatcataaatctacagtattaaaaagagtattgtaatgccataaaaacagacacataaactgatggaacagaatagagatctcacaaataaacctaagcctatataatcaactaattttggacaggaccaccaagaagatatgtggggaaaggacagtctcttcaataaatggtgttgtaaattgtacccttgtcttatactgtacacaaaaattaagtgaaaatggactaaagacttaaatataagacctaaaatcataagactcctagaagaaaacagagaggaaaaagctctctgacagtcgcctttgcaaggattttttgaatatcacatcaaaatttcaggcaagaaaacaaaaataaactagtggaactacattaatctaaaaagcttctggaaagcaaaagaaaaacacagcctacagattatgagtagatatttgcaaaacatatatctgataagggtttaatatccaaaatatataaggaacttgcacaattccatagtgacaaactaaataacccaattaaaaaattgggaaagaacttgaacattttttttttcaaagaagatgtgcaaacggccaacagggaaattaaaacgtgctcaatatcactattagggaaatgcaaatcaaaatcataataaggtattacttcatacctgttaggatgagtattatctaaaagatgagataacaagtgccagtaaaggcaaggaggaaagggaaccctgacatactgctggtgtcggtgtaaattagagcagacattatggaaaattgtctgggagtgtttcctcaaaaagttaaaaatagaactaccatatgacccaacaatcccactcctgggtatagacccacagaaaatgaaatcagaaccttgtggagatagccttactctcatgttcattgcgttatgattcataatagccaagatatgaaaataacctgagtgtccactgacagataaagaaattgtgacacacacacacacacacacaaatattcagcctcacaaaagatagtgccatttgtaacaacataggtgagcctgaaggaaattacactaagtgaaataagcaagacacagaaaaaaatatgctacgttatctaacatctgaaatctgaagaaaatgtataagttgaatacatagacagtagaatggtgattaccaggagtagtgagggtgaggaaataagtcaatgtgtacatggaaacttgcagttatgtgggataaataaatttagagtttcgatatacagctaacccttttttaaaaaaatataaaagcagataataatggggtaaaatgtagtgttttgatctatgcatacattatgagaaagatttgatctagctagttaaaatgtctatcgcctcagctacttaaccctttctaatatttatctaaaatatgtcagatccagagatgtatgaccagattttaacatcatttttaatgtagaattgacagttgtaacaatgattttctcagtttgcttattcaacacccatggaccaagataataaatttaggacctatttaagtagtttctaaaaaggcgttaaaaaaatccccatgggggcaaacaatgtgaatcgaataacatttccaaatgaatgtaatttgctcatttggatgtgagctaagtaaaaaaacgattgtaaaagaaaatgtaagtaatagaaattatctaagaagagcaatgagatgtgttccatctgtgaccaattttggtcaattttttcacaggcatttaatgggtgcaaaatgagccagtcttggtattagaccgttaaaatgcattgtcttctaggagttcatattgtttcccctcccattctgaaaaaaattagaaaaggtaacaacaataaagaattgtggtagacaaaaactcttttgtaaggtatgatttgactcgtataataggtgttacgagtgttgagtggctctgtcagatagaaacagtcaaagaaatgctagtaatgttgtcttgtttgctttacttgtaagtatcttgtgtattttatttacttaatatatttaatttactttaatattaaaacgtgtgtgtgtgtatatatatatatatatatgaatgaatgaattctaatgggtcaggtcatatagtatgtgtgtgcacgtgtgcacatgcaagctgggataacaacgtattatatgatagagtctatctggtgataaacgttcagaggttggaaaagggcattgtgtaccaagctcttgaggtattctgggaaataactgcacaccaagcatttggatattgactgactgataacagtaaatgtacatttattcagctaaataaatgaaaaaaaaagtatcaggcattccaagcagtgaaaataacttaaataagaacacaaaagtaagtctacatttaatatgctcaaagcatcatgtgcatctgtacaatatccaaaatatttccaccagaattaaattttgttattccattattttactataatatttggaggcaaatgcatattaacataatcagtttaaactttgcaatactaaggtttctcttttatttagtacaatgacccaaagttatagaattatttgcctctgatttcttggcaacatatgtatactttactgaaaatttcatctacttcattcttcatcaccctacactcacacagagaaacaaattgataatgagaaattgaaaaggaatatgaaagctcagtgctgatttttatttggttcatgtaaacctctagaagcttagctctattaagattatctgaacctttgtaatactttctatttgaagctatttgcttccaaccagtctatcttatattaattattattttcaattcatcagattatgtggatgcaatggctgataagttgagatatactttgaggaacactgctatgataatcatgatagaggatgcatgggtgattcatagtatttccaactatgtccagttatgtttagtgtttgtgaatcacctatttgcctaccttctctagttgagtaactatatatgtaggtaattgaatcagactattttgctaccaagaatatagcctcttccccgatataaagaggcaccaattacagattatttacctaatggagcattttaaatatggaaggttattaactatttacacttgagtcaacattggaataaaaagttttagctgacaaaattatttgctaagtgtgtacttccatccacatttgccatatattttaaagagcaataaggaaagtcttttaaagtgatgaaattcagggctttcatttaattgatgtttttatgtgacatatttatattaataataaaatgcaaaacagtgaacaggtaatatttaatctttgttcttccttttcttaaagtcaggaagccagaactagtcagtcctatcagtaaaagcaaaagtaatatatccaatgacatttgcttaaatacattaccaagtcctgagaaaggttcttactaatctgggaataaatgtccttatcttgatatgtgtattagtccgttctcacattgctataaacaactacctgtgactgggtaatttataaagaaaagaggcttaattgacttgcagttccacaggctgtatgggaagcatggctggggaggtctcaggaaatcactgtggaaggtgaaggggaagtaggcacggcttacatggccagagaaggaggaagagagagcaggcagagatgctacacgctttcacacaaccagatatcatgagaactcactatcattggaacagtaagagggaaatctgcccctatgattcagtcacctcccaccaggcgcctcattcaatattggggatcacaatacaacatgagatttgggcagggacacagtgccaaactatatcgttctgccccaacccctcccaaatctcatattgttctcacatttcaaaatacaatcatgctttcccaacagttccccaaagtcttaactcattccagtattagttcaaaagtccacagtccaaagtctcatctgagactaaggcaagtcccttcaacctatgatcctgtaaaatcaaaatgagttacttccaagatacaatgagggtacaggcattagctcaaaagagttaaatcgatcagaagaaaggggttacaggccctgtgcaagtccaaaacccagcagggtagtcattaaatcttaaagctccaaaataatttcctttgactccacatctcatccaagccacagtgatgcaagggacaggctcccaaggccttgggcatctccatccctgtggctcagcagggtgtacagcacccttagttgttttcatgggctggcattgagtgactggggcttttccaggtgtatggtgcaaactgtcactggagagaccattctaggctctggaggacagtggccctcttctcaaagctcaagtaggcagtgccccagtggggactctgtgtgagagctctaaccccacattacccttctgcactgccctagtagaggttctctatgcaggctcccccgctgcagcagacttctacctggacatgcaggtgtttccacacattctctgaaatctaggtggatgctctcaagcctcaactctcacactctgcacacttgcaggattaacaccacatggaagccaccaatgcttatggcttgcaccctctgaagcaacaccccaagacacatctggggcctttttagtaacagctggagctggagtgtctgggacatagggagcagtgtcttgaggttgtgcagagcagtgaggccctaggcctggcctccgaaatcatttttccttcctagacctccagacctgtgataggaggggctgctgcaaagggttctgaaatgcctttgggcattttcccctttgtcttggttattaacattcagttcctttttacttatgcaaatttccgcagacagcttgaatttcccccaccaccccgagaaaataggcttttgttttctaccacatggtcaggctgcaaattttctaaacttttatgctctgcttcccttttaaatataagttccagtttcagataatctctttgctcatacatatgaccgtatactgttagaagaagccaggtcacatcttaaatgttttgctggttagaaatttcttctaccatataccctaaatcatcagtctcaagttaaaagttccacacatacctagagcaggggcacaatgctgccaatctctttttgttaaagcattgcgagagtgacctttattgcagttcccaataagttcctcatcttcatctgagaccacctcagcctggatctcattgtccatatcaatatcagcattttggtccaagcagttcaagtctctaggaagttacaaactttccctcatcttcctgtcttctgagcgctccacactgttccaacgtgtgcttcttactctgttccaaagttagttccacgttctcatgtatcttcgtagcagtgccctacctctcggtaccaattttctgtattagtcctttctcgcattgctataaactacctgagattgagtaatttgtaaagataagaggtttacttaactcaaagttcttcaggctgtacaggaagtatggctggggatacctcaggaaatttccaccttcttgtggaaggcgaaggggaagcaggcacatcttataccttacatggccagagaaggaggagaaagcagggggcagtactacacacttttaaacaaccagatctcatgagaactcattatcatgagaacagcaactgggaaattcaccctcatgatcctatcatctcccaccaggcccctcctccaacactggggaacacaactcaacatgagatttgggcaaggaaacaaatccaaatcatatcaatatgctagaatgactcaaacaataaatacgacaagaatattcctcctctgtattgacgctgttcagtatttttctggagaacctagccaatattatatgacgagagaaagttacatgaaatatatattggaaagcacaagataaattatttgaaaataatatgattttctcattatgtaaaatgatctcaaaattaggaaatgtacagtggtaataaaatgatactcagcatagttactttttgtttttcagtttccacaaacaagtgagatcatgcaatatttttctttctgtgtcttgcttatttcacttagcctaatgttcttcggctccatctgtcctgtggcaaataagaagatctcctttttttgtgtttctgttttgagatgaagtctcactctgccactcaagctggagtgcagtggctcactgcaacctccacctccccggttcaagtgattatcctacctcagcctcccaagtagctgggatttacaggcgcccaccaccacacccagctaatttttgcatttttagtagagatggggtttcaccatgttggccagggtctcaaactcctgacctcaggtgatctgcgtatctgcctgccatggcctccctaagtccctaagtgctaggattataggcataagccaccacacctggtcaagatctccttttttttttttttttttttttttttgatggaatctctgtcaccaggctgatgtgcagtggcacaatctcggctcactgcaacctccacttcctggctttaagagattctcctgcctcagcctcctgaatagctgggattacaggcgcacaccaccaagccaaactaatttttgaatttttagtagtgattggcttttaccatgttggccaggatggtctcaatctcttgaccttgtgatcctcctgccttggcctcccaaagtgctgggattacaggcatgagccaccacgcctggcccaagatctcctttttaaaggccaagtaatattccattgtgtataactatatagagagaataaaacagtggttaccaggttgggggtggaaggaggaaatggggagatgtaggtcaaagtctataaagtagcaaatatgtgggataaacaagttgaaagatctaatataaaacatgaggattatagttaatagtgtgttgtattcagaatttttactaaatgagtagattatagcttctcgtggtcagagggtgggggaacgattatgtgagatgatggatatgttaatttctttcattatggtttcattatggtaaccatttacatgtgtatcttatagcatcatgtgtataccttaaaacacacaataaaattatttttaaaaaagagaagttccaaaatctatgtagttttcttagaagtaaaccgcacaagaaagtataagcttttttttataggaagtttaaagttgtatataagtacataaataaagacatgaggaaaggaagtcacatatgatgaaaatgctagttctccctaagttagtttgtacattgaaagtaacttcagtcacactcgcatgttcactggagcactatgcgtaatagcaaaatcgtggaatcaagttgtgtccatgagtagataaagataatgtggtgtgtatatataatggaatactaacgagccacaaaggaataaaattatgtcttttgcagcaacatggatgaaactggaggctatcatcctaagtgaaataagtcagaaacagaaaatcaaatactgtattttcctataagtggtaactaatcaatgggtacacatggacatacagaattgaatactcaacattggagactccaaaagatgggagagtgggaagggggtgagagatgaaaaattacctattaggtacattgtagactatttgtgtgatgggtacactaaaagccgagacttgatcactacacaacatatccatgtaacaaaattgcacttgtaccccttaaatctaaagttcctgaagttacttcaatcaagatctagatggtccctgacttaagatggtttgactaatgatttttcaactttatgatggtgtgaaagcagtgtgcgttcagtagaaaccgtactttgagtacccatttaatcatgccatttttcactgtcactactgtgctcaatgcattacacgatatattcagtactttagtttttatagaacaggctttgtgttagatggttttgccaaagtataggctaatgtaagtgttcttgcatgtttaaggaaggctaggctaagctataatatttgacaggttcagtgtattaaatgcaattttgactcactatattttctatggacaatgggtttattggaatgtaaccctgtcataagtcgaggagcatctgtataattacacactcacatgcccacaaacatgtatgtatgcgactctctgtgtatctatatttgtattattttagaggatataacagaaccctagcaataaatagaatttatctcagatggtaaaatgaagataattgtattttaaaagttacagaagtatatattaacaaataggtgacaagaaataatctagagaggagcaatagtaggaagtagttactatttctactattcctactatatagtagctgaaaggaaagggggaacggagttcagtgaaagctgcaccaatggagggaatgtagttgttggtagaactcagatactacattatgcagctctggagcagggaaataatagagaaatttccccagctttctctttccctcttctttcaatctccagctggtacttcccaccagcttaatgcaactggaatctagccagctaatgatcacaggagatacagtgtgaaagggtcagccacttagagaataagcagagaagaaagggtgtttatgttcagggtgagcacactgaacataaatcacatgaatggtaagagggattcagttttctagataattctaaaatttgtttaaatgtaaatgcgtgagtacagttaagaaattattttcaaacaggtgatttgctttagtagattttataacatacttaacatagtatgacatgatagagaaataatttaatggtgtggaatagatattttgacaacattcccttttatttaggtaaatttagtacacaattagggtgacatttcatgtctctagagatagaataggttagctaataaagccttcaactgtggaaacccaaggcacaacaaatactaagataactttcagataatgattgaatgtgaataaacatttaaatactttattacaatgtagaagaatattacaataatattaaggtgatataaaacctagaggctgtaaaataccgacaaatttaccaacacaaaattaaaatattttccattgtgaaagaccattaaacagtaataaaacctatgatggactgcagaatgacactagtaataaaaaatcaataacctcagtatgataacactcctacaatgaatatacaaagtataatattttaaaagtggctacatattatggtcaggacattcacttgggaaaattagaaatagcccatcaaaataaaattaagcttaactaataaataaatgcatagtacaaatatcttcttattatgagggttcatgtaaataggccctgtgtttcttttggaggaaacacaacttgtaatattttaatcagacaatttagtattatctttcaaaatatgtaattttacatatatttgatcctgaggtttcacatttaagaattagatatatagtaatactcatacatatctacgacaaatgtgtaaggatgttcattgcagcgttgtacacagtagctccagtatttttcatgctatggactgttaggcagatatatctctaccattggactataggcaccataaaatcagggtctaggtttgtttgtgtttgtttttatttttgctcactatttcagctgcagtgtccagcataatcctcgacttatggcaagtgtccaataaatagttacagaataaataaatggataaatgaatacatgcattactgaaattaattttgaagttcacattgtatatatacatgtgtatatacattttaaacttgaaatttgctgaaaacatactttatgccaggcattgctctaaatgccttacttgcacttaccttcttggaaaagtctttgcctcattttaccaatgagggtatgaagaaatgaagaaattaagtttcttatccaaattcataataccagtgagtggtaaagctaaattttgaatctttactaattgagcacatcttaagaaagtacatgcatagacagtgtatatgtttaatctcattagacaggcagatgagtatgataaatggatagctaaaagaatggctgaatggatagatgcatggatgtatggatgacatagcatctggtgacaagtattacttctagctaatgggactgtggtgctgtagagatatggggtactttcactattaactttaaatgcgtctgtactgttttagttttccactacaataagcatgtatggcttttgtaataaaatgtttaaaagtgagagattaaatccagacttatgaaattaaaatatcaaagacaactaacggttgaactcttggggccaaaaccgtcaatgggatgtgttttctctgagggaaagctttcctaatcaaggggcacgttcccattgagataagagtggaaatgacccatctggtcaatccaagatcagagcccatatggggactggagctatgataaggagtcaggctccataggatatagtaattgagatagttataccaagcccctgggtttctggtcatcaggaaagacaggcccctgctagtagagctctacctgagggagaggtatttgagagaggccgacatttcagagtcaagaagaactggaagctataccaagaaaatgggttatgtggtatttagcatatcagttttaaccctcatccagccactgagaaaaggaaagaagaaattttaaaattgcaaatggacaaaaggaacattcagtaattaaaatagcagtaagattctacgcaaagcctttccttttctctatttagtctttgaagttgctaatatctagtcaaagggagttgctttccaaatatgtaatgtttgcatgcatattatagttatatattagtgatcatattgtttataaatgtgtgtataccatcctaggtttttgtttctttattgaatccctttctcatatatctgagcttaaaaagcattttttacaattatcattatttggtagaatcctacccaccgctgactcatagttttagtgagatgacaaggaattcacacacttgaatctttcaaacccccaggtatgcagacgcttagcacaaaatttttggaagctatgcttccaaagttctaaggagtctgcttttcctatcctcagtctgagagcacttgagtacatttttttttctgtagatatcagtcaatattatttttgaaaatacgtttttgtaaagcacggtgctattttgtagtgtgtatgccaaagtttagaacaatgaataaaacattagttttcctgtgtcttgagtattttcaatctgaatttaaaatgtactaactttgtcatcatcactcataggcttcttgattaacctgctaatgctctctaatttggaaattaatgcttctttccctatcacttaaaaataatctgatacagtttctagagcatgagatgttcttcaaatcaagtcttatttttggaaatgtgatcaataagaaaaacttcttgcaatacaataggaagctgaggtgcattatgcttaactttatccaaggtcacaaaatgaaagaactgggagccaaaccaaggactctacttttttttttccactttaatcagactgtcacttattggttgtatgaccttgggctgtattcttaactcacaagagagtggtgaatttaaatgaaaaaaaaacataataaaagttcttgtatataattgatacttgataaaaactaattctataccaaactgaatctcttttgcagaattttgtagggagaaaaatacaggctgctcctgttccttgctatgtgctttctgccccttcaagcagtgctcaattttcaacatgtgtcttactctacattcagggggtgtagaccatgaaaatgaacctttattcccaaaaggttctctctccattcatttactgatttaacaaatactgagtacctactacttctcagtcattggtaaaacaatctaaaggaagttcctgcctttgtggtttttatattcttatataaaaaataaacataataatgacagtttgtgacaagcaatgtaaaggaaatcaatgtaaaataaagggaaaggggttgggcttctttaaatgggataggaaatgcatctctgaagaggtgccatatgagttaagacctaatgggtgagaatgaatcaaaaatgcaaaaagagaaattattttaggtaaaagagcaccaaatatgaagatcaagaggtgtaaaatggccttcggtatttgagatgcaaaaacaaaacaagaccaatgtgtgaaagagaaagagggatgacattagagtgcttttagctaagtgtgaaggattgggtcatgctgtactttacaggcatggaaggcagtgtcttttaacacatacatcaaattctattcactattcaaaaaatatactttagtatatacattttaatgaaaatcaatctcagctatgttttacgcattcttaacatcatttattacattctcttttataaagttatcccttatcatcatcatatttgtgttacatggttttggatgcttactctctttttcacttgtacctttctccatcaatgcttcacatttgattatcttcacttctgtaaatttctaaattgcatttttttcacattggaaattacttgacatccatggatattattgtatttgtagttgggaggtcctaattacaatggtggaagccagaaactccaaactcaaatgaaatttcataagtactgtcaaaaggaaaatgtatctttgtaatttgaaaatgggttaaagtttgctacttcttgattgggtgtgtttcatcagcatgcctccagtagtgcttagaaaatacacaaatgcgtgatgttcgtccactggtttcagttttcagttagagtactactgaaaactttggattagttcaggaaaacttaattcgccatcagttattttgtcagttgttgaagtttgtgtgtgatggtgttttgctcaacactgaaccccttattctgatgttgcgtatgacatatgataccaccatgacaccatcccacataaatgttttgtgctgagagagtcacatcagtgttgtatgccatctggtttgtccaatggtccactcgtttcttccttaggaattaggaaatggagccattctaattataaaacgtgattaattgcttggtgaattggtatcatgtctgacacatggtaggcattccacaaatacttaatgaaggcatgaatgcaagcaaacctatgaattacaattatgtgccaattggaaggaaatcaggaaaaataatagatcgtatatattgagcatttactttgcattcattttctctgttaacatcatccctaattatttgcaagatactaatatgactcattttatagataaaaactgggacagggaaattagtgaattttaccacagtcccttacctattagtgatagggtcaggatttgatcaaggtatttttgcctcaacaggctaagctcttttatatgtagtgggtccatttttaccatatttttttcaaaaaaaaaaaaacctgatcattttgtacaatatctgcgttaagctagtcatcattgagtaatttgccccaggactgcccttataccatcaggcatattttgaaatcccaaaatataccagaaagaataataaccaattaaatttatgtcacatgaaataaacatctttattctggcctcactgtgtatcaagtataacttctaacactgtaaacaattaaggttcacaaatagactattttatgttagcgaggaagataaggggtggagttacttctgaaactgactatactttttctagcagcagaggaaagaaaaagtcaatttggttaggtcaaaagcaaagcacgaaaaccgcaggtgacaatcacttaagcagagttaaatgtcactgagtcaaaatactttcatctcaaatgtaaaccctaatagttcttcccacaacaggcatgtcgagagaattgtaagaaagtacagatgtttttctatctgtagtctcccatgctgactgagtagcttccatttgttatgtcaagttagtgtctgttctcctgggtttagaagttacataccaaatatttgttctaaggatttaaatagtcaaggatgtatttttcaaataaaatatatttaacatatgtaaacttaggacaattgtgacggaagagacaattttgaaaatttcctgcatttggaaattgaaaatttaaagatagaacttttcctgttgattagggcacacggcagaaatttgatttttgaaaaacttttcaactgaaacacgtcttatttaaaactcctaaagtcacagttggttgcgaattttcatttaactgacttttccccaccagcttctgtgcatttgctctgaggcactctcaggatgtttggtattaacactgcagagcttccattctgatttaatttccaaaaactatcccagcgaagagggcttttatggaaggcaattcaatgaagcagggatacagtggcaagtggtaaactgagaattttgaaattatttattcgtaacttcctttcccattacagtcattctttcatgagaacatatctctgggatcatttatttaccattgtattattaaagtctaaaatatagcctggcacaaagtaactcaataaacgtttgtggagtatatttttctgtgtctcatattttcaatatagatttttttttaccccctccgagacggagtcttgctctgtttcccaggctggagtacagtggcgtgatctcggctcaccgtcatctctgcctcccgggttcaagcaattctcctgcctcagcctcccgagtaggtgggattacaggcatgcaccaccatacccggctgatttttgtatttttaatagagacggggtttcaccatcttggccaggctggtctctgaactcctgacctcaggtgatccgcccacctcagcctcccaaagtgctcggattacaggcatgagccaccatgcccagccatagtttttacaatcactatcattacttccagctaccattatttactggattggctgcatgataagttccatttgtattggtaggtttaggatttattgattaacagaacgctcaaatagttttcagtgtatcagtcttctaaaagcatctgattttccttttttccctgttatgctctaggcaagcattatgcattttgagccactgtttttttcttttttaattttttgtttgtttgttttttgagatggagtctcactctctcacccagggtggagtgcagtggcccgatctcagcttgctgcaacctcctcctccctggttcaagcgattctctaacctcagcctcccgaatagctgggatcacctgggattagaggcgtgtatcaccatgcccagctaatttttacattttttttttattattatactttaagttttagggtacatgtgcacaacgtgcaggtttgttacatatgtatacatgtgccatgttggtgtgctgcacccattaactcgtcatttcgcattaggtatatctcctaatgctatccctcccccctccccactccccccaccccacaacaggccccggtgtgtgatgttccccttcctgtgtccaagtgttctcttttttcagttcccacctctgagtgagaacatgcagtgtttggttttttgtccttgtgatagtttgctgagaatgatggtttccagcttcatccatgtccctacaaaggacatgaactcatccttttttatgactgcatagtattccatggtgcatatatgccacattttcttaatccagtctatcattgttggacatttgggttggttccaagtctttgctattgtgaatagtgctgcagtaaacatacgtgtgcatgtgtctttatagcagcatgatttatagtcctttgggtatatacccagtaatgggatggctggctcaaatggtatttctagttctagatccctgagacatttattcagccaaaaaacacatgaaaaaatgctcatcatcactggccatcagagaaatgcaaatcaaaaccacaatgagataccatctcacaccagttagaatggcgatcattaaaaagtcaggaaacaacaggtgccggagaggatgtggagaaatttttatatttttagttgagacggcttttcaccgtgttggccaggctggtgtcaaattcctaacctcaggcgatgcacctgcctcgtcctcccgaagtgctgggattacaggcatgagctaaagcgcccagcctgagccactgttttctacttgtaacaagatgatggtgatagttttctgctagttacaccataagcatgttgaaaagcgtaatggaaagtgcaaaagataaaattgttttgtgtttctcctggataaatataggccattactttttatcgttattaattttatgatgaaattcaatcatcttcatcaacgcaaattatttccattatgacattttaccgtcctttaatgagaagcattgttactaaatggtaaaagcaactgcttgtatcagtgaatgaagtgctaaaaatggattaattaaggagtacttaatttagctaaggcagaacatatcttgcagaatgttaaaaaatttaacatgggaggagttgtgcaaattttaattaaaatgttgtatatctattgtatatagtgacttgtaagtagagaatacatgtatgtacaatgcagtcagtgctgaatgccaaatacaaaatattaaaaataacaatatcatgctttaatgaattagtccattgccatgatatggtctacaacttagaaactccagcatttagatatcagatgatattataacataaatctcttcgtatgcaagcctcaaaaaataatccactttacttccagcactttgtccttttagaatatcacatcaatgaattaggttattgtttacaaccataggttttggttgtgccaacatataggcctttctgttttcatattttgagcattctggctatggctagtttatgaccagaagtgccttctttccagtttctctattccttttcttctcagtgaatttatttatttttgtttcctaatacaaaccctgtggggaggttgatgctcatcatggtttctaaatgacatcctctcacagtttttgttgtttaataaaactcttaaaagactgaccaactaaagctttgtgagtgcacatttatacctgctatctttgaaatcttgcttgttttcaattacacatgctatgcattataattctgtatttccattcctgcctgtcccttggcagaaacttggcctgaaatttagacagtagagcctcttctttagatttcccagcggtgtttgaaggttacacccagcgactggctaatcggacttccctgaggttgactgcccaagattagttttgttgaaggcactgctttcatcttacttactcacattgactttcttggggtgagggcatgttgaaagcaaactttgtgcgatacttggtcttcaaatacactgagatagtatctgagagaatgaggttaaggtaccatggcagtgtagtgcaatgactggtttctaatctgattttgactagcctttgaatttgccttcagaccgccatgaggttcaacttctttattcgaaaaatgatcaaatttcgctaaatgatttatttgttccatagtatcctcaaatatgaaacactcatcagaaacggtgttattgttcataaagtaaaatctctagcagtattgtgagttctcactattttcattctgagacggcttcaaagattggataagcaattattaaaatctggtgtccgtgagcattttatgtagtagagtcttggtgtaaaattacgttcatgtaattgttaagttcttactttggggattcagccactgctctcatttcataaaatcttaatgtcgtgtaataagaagtataaattacatcccatcattttcatactcctcaaatactttatagtactcattatcataccattgcctttagtcactgtcttacataattctcatcaatttctatgactttaactgtcctctgtattgagtttcttaacaaatacttaggtgatcacagagtgccaggaattggccttagtgcagtcatcataaatgaggattaccccgaagtccataacatttattttgatttcccataaaaagtaatgtttataattatggggtggctcatctgctatatactcataatctaacatagtctaagtatattctatagcacatgacaatcacttagcacatatggaataagtgataaatgctttttccttctaagtaaattcttctggcttcctgttaatagtatacaaatggtctcctacaactaggtttgtttttgtgttaatgatagaaacagcaaaaatatgacaaaaatgacaaaaaaatgcaacatagtaatggtattaaggttcaacaaactttacagttttactaaacattggatttgggcttcataacatcttaaataagagggaatgctcctggtcaaccacagtctctgaaaggagcgtattcttaggttttgcggggggagtcagaagtccagcaatctaagaacatttcagattgggaataggatgatgatagctttagaagcgtggtaactcaggtgagaccattgttaattagtttgagaattatcttcattgaagtgaatccactctggcaaagtttcagaagggagtgtttgctgctggttggctgggggaagcatgataagaatcatggaggaactaattgttaaatgaataaatagggtagattgaaacttttgttggtgtctacttgttaccatggctgcagaacaatcagtgtcctctttcgtcctcttcctcctttgttttattgtcagtttattaatctttatatcctaaggctgtagcacataactttgtatataggcatttccaaagactgtggagtaaatgatttgaaaattgaatgaagtcatttttgatccatcttagaatttttgtcattcattgacttgttttcatttcccccgtacacagttgtaccttagatcttgaacactttatatctggattatggtcctagcctcctatttctctcaagttttcctccagcaatccattctgtacttaaagaatttactttaataaaattttgatggtgtcaccctctcattgaaaagtatttactctctagtctattgaatgaaggccaggttttctagtttgctgttgatgatccctcagttttctatgtacaatctaccagtttcatcttagttttcactactctactctctctaagacacacaaagccactgttgccaagacatcgctaatgtgtccctacctctgcatgtttattctacatattcccactgccccgaatactcttccccattccctcatttccagctattgaaatcctatgcataattaattcagtttcctatttaaagagaattgccttatcctccaatattatatgattttaaaaatctgaacatgttaaacaactggttgtgccaattagaggaacacattttaaattctgttcagcaatgcaattactttgtacttctattatttactttcttattccaaattagaagcagaattcatgaattttctatctttcaaatttcctggataatccattaaaatactttgaatataatagatttcttgaaaatgtatgttgatgaaattcaaaatattttagaagacctaaattcctttcttcaaaaattacttatttctacctactggcagttttgaattccacataatctcagaagtgggatagtaatagtttggggcaaaatggcaatagtttggttaaataagtgcatatttattgtaatgactgatatttatgaacagctgcatttagtccacatgttttatgtaaatgaaatttattacaatgtttgaaattttttggggggcaataaaaataatgcttggccaatttttcaccattttttactttttataatggcatatatttgagaccaaacatacatgcatgtgtctatgtataacacagcagtgaataggcacaggctcaaccctttttgttttctcacatcatggttttatttaatatactaaaaatgaaagagctctaagttatgctaatcacaggtacagctgactagttactagtgagaaggaagaacattttctagaatttcaagatacggtgaagtatagtatctactatataagaaacaattggtcaaatattttgaaaaacaattatcaaatgaattggagatttctaggcttcagaattccaaagctaagtttgtaagattattaaggaaggcagtgttcatgcacaaaatattatttagttcttctttaaaaagtacttgcaaaaattactttgaccatctgttgattaataattaaagtgtaataagttgagccatatgtgttgtataactttgtacctttcagccttgtgcattgaaatgtctaatatcatttgaataaatgaataaaacaataaaacgggagatgatgtaacagtctgcttataagtaatgtttttggcccttattcaaaatgtagcagactagcagtttcagcatcacttgggagactattgcaaatgcagagctccaggctctaccccgatctattgaatcagattctgtagttttaaaagatccccaggtgattcatatgtacattaagaattgagaagcactgtattgttctacggatagaagtagaccaaggaacattaattttttcgtctcttgtaactctttttaaaaatactttaaaaatagctgttctgattaatcatggttctgatacttgcaaaagaattgatgaagtcacttgttcaacctgcttttgtgctaacggacttgagactttactcttggctttttcacttataatcagaacacctgatcagaatatacatactgaatacagatatcttaatagtagttaagctaagataaattgtatggcaaggaaaatacattgccacattaccttgacctcctgccaggatttatgtttatcttttatctttgatttttatattcattaatgattaaaaaactaaaattgcatacatttatcatgtacaacacgatgttttgaaatatgtatacgttctggaatggctacattgaactaattaatacatgttttacttcatatgcttagcatgtttcatggtgagtatacttaatatctactctcgcagcaatttttaggaatacaatacattgttataaactaggttgtacaatagatctcctgaacttatttttcctatctaactgaaattttgtgtcctttgaccaacatcttcccaacccctgccccacagcccctggtaaacaccattctactctctacttctatgaattcaactttttagattccatgtgttagtgagatcatgtggtacttatctttctgtgcctggcttatttcacttaatatcctccagatttacacatgctgtctcaatgacaaaatttccttctttttaaaggatgaaaaaggatgacaatgaaatgctagcatttcatagtcagaacttatgtgttaacatttctagtactaatgacatacttcacataaaggattactttacatcttggttcactggaatgagtgcagtaagtaaattttaatgccaagtagcaaatgaatcttttgaaggagctgccactttatatgtgttattacaaagtattattgactttaaatgctgcgtttcattcactttctggatgtggcaaaggatatgaagtcagatcaacttaatgtgcgggacttttacatttgtctctaatgtctgagaaggaaagtgatattctactttatcccatgcaccacaatgtaaacaaatatttttaacatacacggaatagtaaaaatcattatatggtatttttctgtttaatttatattgtggatacatgactcatttcagcagagacttatttagctctctgcatactttaatatcagcaacattcagttaaaaggtatcaggtttctttactgagaaccaaagcggtaaaccattttgtgtatttgtttaattaccagtgcaccatttgaattgacatgttaatataactttccattggagggaaaatgtaatcttttatttttgtttcttatctaatgaaagctactctgttagatgggctagtttggcaatttgacttaggaaaaagtaatatggaatgaagtttttatatgaacaaggaaaataaattaactttactgctcatctcattggtctgccaaattggaaagacattttaggcctcattctcatgttctaattagtctctggaggacattcatggacaattcactgttcattaatctatcgtcttcctttaactttgatttgttcattatccttttagagtctcaaatatagaaaccaaaaattgatgtgtagtgttaatgtgcttacagatgttgataccacctatccagataagaagtccatcttaatgtacatcacatcactcttccaagttttgcctcaacaagtgagcattgaagccatccaggaagtggaaatgttgccaaggccacctaaagtgactaaagaagaacattttcagttacatcatcaaatgcactattctcaacaggtaaagtgtgtaaaggacagctactattcaagatgttttctgttttatatgcatttttaggtattacgtgcacatatatatataacttatatgtatatacacgtgtatatatacaaagcctaatgtatgtatatgtacaaaaagagacagactaaaccttttcaattttgcttcattgactacaatattcatttcaaaacatattttaaaaatactattcatatgtaccatatcataggaatatagaacataatatattaaatttccattgtgtaacacacaatgaaatgaaaggcaaacttacgtacatattaaactctaaaatcttcatcaactagaacaaagagctagagaaagattaaaggcaaatacagtttttaatcattaaaaaatactttatgacaatatgatgtacaaagtcagattttgattattcaggataacaattttgaaaatagaaaagtgttttaaactatttcaaataaacaataaagaaaaacatgatgaaattcttcgttacataattgtatagaatttagtggggttcttccatgacattggcttgttctttctctcaacagtgggtggtttggatgttttcctatgctttctcaggcacaaacaacagtgaagaaacctttagcaacatttctgctgaatgtgtggagagctcttaggccaaactctctcactttgctgagctagctctgtattagcttatgaaatttttagtcctttccagggtatggacctgatgaattctgtttttatttactttggatttagagaaaattgcttatggatgcctgtttttgccggattgaagagtaccatcccatataaatgttggagttgtgttactttggaatcctcatggctaaatagcatgctcatatcttcccagatcatttactctccaacatgatattaagtgccttcattctgggagtataccaatttcgaatatcatttatatatgtttagtattaaacattgaatctcaccatttccatttaatgttctgttttctaccatgttggaaagtagtcctttcgggttacttatggtttttccccctcctctctatccactcccccaaacccttctctgcagatcacggtcagtctagcacagggatatgagagaacttcttcccctaagcctcgattcaagagctatgcctacacacaggctgcttatgtcaccacctctgaccctacacggagcccatttccttcacaggtctgtcaacatttactctctgttgtacaaaccagagaactgcttccaagataatctaacactgcttttacttgcttgaatttttcagtgccttttatctcctcgtgaagagctggtttgtttttccaagttttattgattccctcatgtgattctgctttgttattgagtcttctctaggtttactatacgttgattcttcataaatatgaattcccgtaatggtttctactttcattatgtaataacctctaaggttctctttgacaaaggctgctaatggttataaaaaacatgaggctcatgaaaagttttatatatgtaacttcgaaaagtgtaggtacatctgtgaaaattgctaattacactatttggggagatttttctggatctacgtaaaggaaatacatacattctaagtgaattattttatctattcattctaaaatatatattctatgtaagaaaaatataactgcaagcttcttcatatgctctcctttaattttgctaatttaaacttgtgtatagcaggctctgtagtatttataagaaaaagtcacactgaaaccaggtcatattctcggcaatgtttagtactttctatatgaggaagactcagtggagttttccaccctttcaatattgtatggaacccaatatacaagaaatagccttataaatgttacagcgtgggaatgaaatgtgctaggattgctagatttgcaagaattactttttaacaaaaatgatttattttgctcaatggagccaattcgaaacgtgctagaggatgtgatttttatcaaaactacactatgaatgggagtttaaaaatgatagacctgatcctatcggctaaaaaatgtgtacatttttggagactcaattttttgttaagatagtggtgtgcatttaattagtaatttatttggcagttaatcgatgcattagctgaaaattctaagctttgaaatagttatgacctccatccttggctagtttacttgcaaagctctcttctcactctctctcattctggacctcttgactctccatcgactctctagactcaatttatcaccattccctccgttgaaatcaccaagacttaaggaataagtgccacctcctaagattaaggagcatacaccaagcaaagatataggggtttttttccccctctcattatcactttattgagctgccttttctaggttttctccaatgcctattctggtagcacattttcacctcatcaccaccttcattaaggcatcgctcaggtatgactccttaatgaagtaattacaaatggacttacatcttgctaggctctgctcattctacctttgtgtaaatattaccaaatacataatatgtcataaatcacagataattcaacaaattcacttacttgttttatttaaaataagccattcaaataaatgtaatgtttatcatttaaaaaagacacagcacaaatcacaagagatgggggatggggaatgatatattctgtcactaaaggaagcatatcagaagatgatgttacatgtagttaggtttgataagtgtatgccttaattattcacactaagaacatttatttcaaaagtgtcaaaaggactgagctttcactgcccctacaggctgtacctgctctacttcaaaggaactcaagacaggctggatctgattccatcagaaagctttattaaagtgtttacttgctggtctacagagaaaaataacgttctctataagaggagagagccatgtgggtgactgtcccctatggaaaacacgtgcatgccctcactccccagacacatcactctgctttaacttcatttatttattcaacaaataagtattcttaatcacagagacaaatggcttttattcagctctcctaactttctaccactgatgaaacatttttctcagcctctacactcagcgggttcttcctctctgactattctgtgtctttcattacctggctctttctgttcttccaacttctttagcttatgaaactcatgggaaatatcttggcattcttatctctgtacttgttcttttatcaacataatttaataataatttaataacctggcttcaatctgtattcaatctgtatgcaaatgatcattgtatctctgtcttcaccacttccaatcttacttgagttatagccacatttccaattaattttcaactctttgtatgtatctataccttgatatccactaatatctcaaacctagtatgtctccaagtgaagtttattatgaagtttcttgtccattttttaatgttattcagagccctaataatacaatttttttcgcttaattttgtccatataacaaggctactctcctaaactgcctcgaaaagatttatgatatattaatattttatatttttatgctcattacacacgtatttcatgttccttcaaccaaattacatcactcgttctcccacacaggtgccccaaaattttccatattagcttttatgcttcccttagctcagagtgcttttgtctctgttttaaattggccaacttaatttgtatttctaggcctaattagtaagtggcagaacctgaattcaaatttgcatttattcaactccatgcccatgctcattatagtagggtgacgctgcactttctcgacggtgattcttatatattgcgttacgcacacatagagcagtattcatacatttgattatttagcgcttgtgtttgaatcacctattatgtgccaggtactgttattgaagcaagtgacacataaacatgcaaaacaatctgtgtctgaaagtattctaattttattatcctcctgctgtcttccctcatgccatacgtttttaactcatttaataaatggtaaggccgggcgtggtggctcatgcctgtactcccagtactttgggaggccaaggtgggtggatcacctgaggtcagagttcgagaccaaccgaaccaacatggtaaaaccccatctctactaaaaatacaaaattagctgggtgtggtggcgcacacctgtaatcccagctactcgggaggctgaggcaggagaatcacttgaacccgggaggtggaggttgcagtgagttgaaatcatgccattgcactacagcatgggcaacaagagtgaaactctgtctcaaaaatacataaataaaaaaaataaatggtatgatatgagccttttaattttatctgtgagcttttctgtttcatgatcctctagcatagcatatctggtagcagaattggaggccaatatttcatcaaagtcatttccctcctgatgcagtagatgtgacttatgaaataattagagaaatcaaggattaccgtgaggtttcttacttaagcaactggccaaatagagttgccacaaaccaagatgggtgagactgtagaaggaacaggtttgggagtgaacgttaggatttcagttttaaacatattaatcttgaggtgcctatgaggctatgaatgcatgtaaagaaggggttctaagatcagagttgaggataataatttagaagtcaacacatagatgttatttaaatccatcggccaggataagattgccaaggaaaaatgtgtagacagatgagatctctagatgtatatatgatgaggcatcagcaaaggggctgaaaaaggtggctagaaaggggagagaaaaaggagaagatagatgtggcattctggaatccagaagaaagtgttttcagagaaaggaagatacctaactacattaaatattgctgatgagttcaaataacatgatgattgaaaattattcagtgaatttaggaaaacagtagggtacgatgtctgggaaatcctaatatatagcagttactacagtggaattactaacactcctattcactcttaaaactttcccattttgaccgataaagttacatgctctctctagtttatatcccctttaataagaacaatttcagtggtgtgtgcatgtgtgtgtatttggaggtgttgctgattagagtaggttcaaacgacagtaaaagtgaaggctaccctcattgtaacacttaaaaaaacaaactacaccgcgagctgggtgtagtggctcatgcctgtaatcccgcctcttttggaggatgacgcggggagatcacttgaggctaggagtttgagaccagcctggccaacatggcaaaatgctgtttctactgaaaacacaaaaattaagcgagtgtggtggcacacacctgtaatcccagctacttgggaagctgaggcatgaggattgcttgaagccaggaggtggaggttgcagtgagctgagatcggccactgcactccagcctgggtgacagggcaagactcggtctcaaaacactaccctgaatagttgatggccacagggacaaaaacatacttcttttaaattaacccatcctgataactaatcatgtgtctatatgtattagttcgatttttgatgcaacaactacaaacctagtgcccctaatcaacacatattcattattttacagttctttagttcagatgtttaaaacaggtctcattcagctaacattaacatatcagcagggctgccttccttttggaggctgtagaggagaatccatttccatgccttttctagcttctagaggctgaccacattcactggctcattgccccctttcaacttcaaagctaacaagggcaaattgagtctttctcatatgacatcactcttacctatactcttctgcccccctacatctacttttaagagccttcattattacttacttgctatgtgaccttcagagaatttcttgaactctgggcctcagtttcctcatgtgtattattgaaactgtttctaactcatatagttattaggagtgttaaatgagattaattttataaagaacattgcatggtataagcacattgtaagttctcaaaacccggcaaccaatatgattactactttagatacatcaggggttagataagattttgtggtctgatctgagaaaatttttatgtttttattagcacttttatgagaagagatagcctggattctgatttataaacaaactcacaacctgtatagagttcggcaagttaatataccgagtaaaagattctaaggaaaaggatatccttttttgttctgaggttgctgaggaacaatcttggaaccatgcagagcagaacatagtaatgccttttataaagcagaaaaagcacttctgggtgattttacatccagcaatcctgtgttgggaggggatgaggcagaggagatttttcactctatctctgcctttgccccctcctggcacaacttgtccctcagactgtccacatattgtagaaagtaattggcaaacagaggatgggaagccagccagggagaccactccttagattaaaagtatcactaatttgcttcgaggaagcctttatacatcctgatgtgactgaacaaattacccagaaacagaattgttaggttttagctcaactctataaattggtacactgaagacttctgagtagaattttaaaactggaaggaaccttgaagtgaatatatgtgatgatgttattttcaacagttacactcttatcgtttaacttcttttgaaatttactttattgtgtgtaagaacacttaacatgggattcaccctcttaactgatttttaagtgtaaaatacagcattgttcagtataggtacaagttgtacaacagatcttgagaattttctcatctttcatagctgaaccttcgttaattagcagcttcccacttcctcctctccacagcctctagcaactactatttcactctctgatttgatcagcttgagtattttacatacctcttataagtagaatcatggagtgtttgtccttatgtgactgtcttatttcacttcccataatgtccttagggttcatccatgttgttaatgtggcaggatctctttctttttgaatattaatagtaatctcttgtatgtatataccacattttctttatcccctcatccatcagtggacactgaggatgtttccacatcttggctcttgtgaatggtgttgcaatgaacatggcattgcaggtatcccttcaagatcctgatttcaattcttttggataaatatccaaaagtgagattgctagatcaagtgggagttctgtttttaatttttgaggagcaactatattattttccataatagccatgccattttttacttcaccaacggtgtacaatagttccaattattccacatccttactaatccattttttaatagtaggcatccaacaggtataaatgtgatagctcattctgcttttcatttacatttccctgataattcataatgttgaacatattttcatacacctgttgaccatttgggtgtcgtctttggagaaatgtctgttcaagcctttagcccatttttaattgcgtttttagtttttttttttttgccaatgagttgtaggaattctttatatattttagaagataaccagttgttaatataatataaggtcttcaggtctgatcacaaaatcttacctaagccctgatgtatttaaaatagtaatcatgatattggttgctgtctttttgataacttagaatgtagctataccatgaagtattctttatataattcattttatttaaccctcctaatagctctgagttagaaataattctcataatatatatatatggtttgtattttcccattccatagattgccttttcacagtgttgatttgttcccttttctaaacagaagatttttagttttatgtagtcttaattctattttttttgcttttattgcttgtgcttttggaaataattgcgaggatgaatgtcacaagatttttccaatgttttcttctaggagttttatggattgaggttttacatttacatattttatccgtttggagttgatatttgcatatggcataagataagcaccaatttcattattttgcacgtggatatccagtttttccaacaccatttgttgaagagattatcctttcctccttgtgtatgcttggctctatcgtggaacatcagttaaccctatatgtgtagatttatatctgggctctattctgttctattggtctatatgtctgtcttcatgacaatacaatttatttttaattactgtagtttagtaatatattttgaaatcaggaagtgtgatacctccaattttgtacttctttctcaaggttgatttagccatttgggattctttgtggttccatatgaatttcagagtttttctctgtttctgtgaaaaatgccattggaattttgataaagattatattagttctgtagatttctttgaatgtaatgacaattttaagtccttcgatccatgaatgtaggatgtctttccatttgattttgtcatctttaatttctttcatcaatgttttatagttttcagtacatactctttgacctctttagtttattactgttttctttttggtgctcttgtgaatggaatttgtctcctagaaactcaactaatttttgtatgatgattttgtatcctacaactttactgatttttaaattggttctagtgtttttaatggattctagggttttctattcataagattatgtcatctgcaaataggaataacattcttcatttctgatttatatacctttacttttttttttttgcctaattattctagcaaggacttccagtattgccatcggtagaagtggcaagaatgggcatacttaccttgttcctcctgttcctgatttcatagaaaatcctttcagttcgcagttgttgtgatatgacctgcgatctttttatatatggcttttacattgaagcaatttccttctattcctagtttgttgagagtttaatggttttttttaaatagtgaaattgtgttgaattttgccaaacaagttttcagcatctaatgaaatgaacatgtgacttcttatttattctgttaacgtggtgtatcatactaattgattttcatgttgaaccatccttgtatcccaaggataaatctcacttggtcatggtatatgatccttttaatgtgttgttaaaatttgccagaattttgttgagaattttgcctctatatctgtcaaggatattgagttgcagttttcttgggatgtctttttctggctttggtaatgctgaccttataaagtgaatttggaagtgctccctccacttcagttttttcaaagagttcgtgaagcattggcattaattttctttaaaaaatgtttgatagaaatcacttatgaagtcacctcgtcttttgcttttctttgttgagagtttaaaaattacttactcaatcccttacttgtattgatctattcagacttttccatttttacacagttcagatttggtaggttttatgtttctaggaatttaaccatgtttttagattacagtttcttggtgtaaaattgttcatagtggtctctttatgaagattaaaggagcgttattgtgttatagtccaaaaacctagaggtttttaaaaaaatgatttagtgtaagtaacttaaaaacaaaaagttatttaaggtaaagccctcattaagtatgaaaattttataaggatagtataaccaaaatacatcatttattccactaggtgtgtctgcatttaggaaatatgttaaatgcctagcatgtaatttacatttattatttctgatcttcaaaaaaatcttacaaagatgtaactccacaaatggagttacctatcaaaataggttaggaaattgatgcttaaaaaaagctttgaatagtgtgggaatgttatttttcttcttgacatataagtgataattctaaataagaataggaaattttctgtcatccatgtcccaaatacatttcctgttttgtcctctgaattattctattcatgtttattttgatgtaaataagaattttaatggtgttaaacttttcgaagaacattaaggaatattccatagctaagatattaagatgaaaacaggagtataataggaatctagtctgtgggacctgcatatgctattttctctctattactcagttttctcatctctaaaataaagatactttcaactttccatggggtggctaaaataattaatgcatagtgtatgtgagaaaagcctccactatcacatagagtgttagaggggaaagactccattcaccttcttacacaacaggcattcaataagtagttaagggtaaagaaatatttacaacaacgtggatcaacactcttccattttgcattatatttataaatgataatgtaatcttaaaaatataagtcaaaaaatgtagaatgaaagtccatttttacatttggtaaagatatttggagtttctggaagagatgatatataattttaccaaccattctagaaaatgacttttttgtctcttgataccagagataggtccagaggtattgctgtggatgttacaaaaatagagtcaatttttgcgaaccaaggatatttgaatgctctcatttaagtcatgtttattacattttatgggatttgtcggttcctagaatttgaatgaattattggatggaatttagctaatctgtgttccggtgtttaagcaggtcagggcggcttatttgtaatcattaatagtttgtttggatctccacatgtaggctagatgcagtatgccttctttaggaagggcctcttaaggaatatctttttcaaacatttattttaatacttttttatttttatgttttattatttttcttttacaaatcaagtctttatggaagtaagaattcgtgttacaactgattgaccttagttgtgtgactcagttatctcttggcatacctgtgtaatgcttagctcacctgtgtaatacaggtgtgcttaccttgttcaccagtaactattgccatatagcaaatcaactcaaaacttgggagcttataaaaacaacattcgtttttcttattatctcttttgattctgggtctcagatgggttcagggcttctcatataggtgtaataaaatagtagatgaagctgaagtcattttgaaggcttcttcactaacatgcctggtggctactgctggaacttcagccagggcagttggctggaacatgtatatgtggccttatttaatctgcagtcactcactaaatgctggctggattccaagagtaagtgacccaaagagtaccaagcagaaactctattgccttttgtgacttagtcttggaagtcacatagtataacttcttccatagtcaggggtccatcctagtcaaggggcagaaacataaacccaactcttgatggagaagtatcagtgttacatccgaagaataacatgtaagatgaaacatattgtatccatcttaaaaaaatacaatctgtcagaacttacaagattcttctgaagaatccaggttagttgggaaatgtggctagcatggtgcctaacaggtgttcaataaagtgcactctacttactgatgactgtacttgttttaggtaagcttgtacagatcttcaaatatccaggctcctgattaagaagtttgagaatgtccttgcacataagtgtcacagagtaggagccgaaatggccacttaattgctttctagcacaaatgaaatttcaaatccatttggaaataatttgtatgtgtaatttaataccaagaatattaagtagacactgaaacctctacacctttcattttacaggtgaagacactcaagctgagatatgctaagtcatgtacctaagattacagagcagaaatatttggtctaggatcctgatatcctgaattttgttaaacatgatgtcttcttaaggattataattattttaagctaattcatcacactgtcacattttctgtagggcgatctctagtttctacattcattaagtaatttgattttcttttttgcattaattttattacaatctattttgttttcagaaaatattttaatatttttaatcttttctctttaaattattaaccttatattttaatgaaactatattcaaagtgttgtaacatcataattaagatacatgacaaccatgattgaaaatgaaaacttagatacatttctttcttttcttttcttttctttttttttttttttttttttttgagatggagtttttgctctgttgccccggctgaagtgcactggcacgatcttggctcaatgcaacctctgcctcctgggttcaagcaactctcctgcctcagcctcctgagtagctggtattacaggtgcctgccaccacacccagctaatttttgtatttttcagtagagacgaggtttccccattttggccaggctggtctcgaactcttgacctcaggtgatccagccgccttggccatccaaagttctgtgattacagatgtgagccattgtgcccggccatacagatatattccttaaaatgtataattagtggatacccatgcctaattttaatccctgctatagaattctggcagcacatatccttgcatattgtggtctttatctacaaataatatcagtgaaaaaatgtaataatgcttggttaatcaacataaacttgttaccaaacttgtagattaacacagagcctcctattatgtcatacatgtgttaaatccatgtgggtctcaaatctactagcaaacttttttgttttcactaagagtttacccccttaagcatgtcaatgtaaagaaaaatattaattcttttgaagagataccttatttagtaataattagagtgactttaaaatcaacacataattaacggtcacatattttgttcattataaagtttaatagaaatacagtcattttttaaattatgagaatgctatcaattaaatctttggggaaataaactatctttggaaggattaatgatgagttgatggtatcgttatgaaactcctcatttctagatcatctgcataccaattcagctacataaagtcatgttcctcttttatgtgtagcaaatccagattttcaagcttagcattttaaatacttacttctattaggtaacttatttaaagtgtaatgatgccaatgatgagaggtatgtataacaatgggattacttcacaataaaacttacttatagtgaatatttatgaaaatgtttattaggtgtctctgggaactctggtcaatttaaaatcttagtacattttatcttcattataacatgtcccaaggaaatttttggctgaaagattagcattataaaaatagaactttaattagaaatttctatattgtgtgtcagattgctaaatccagtggcaattatctgcttcctaagatatgtagtcctctttctgaaacattcaaatttactttataatacctgaaaaagtcatttcaagaagaaatttagatcattaatggaatgagaaataagattagcccgtggattcttctacttctactttataatttaaatttcaggtgagctaggtgattaaagtcattttaactatttggtacctcaaatagttcaggaacaagtatgccggaagcactgtagtattaccattaatttaataattgcttattggccacttgatcctagaagccaggaataaatgtgaaataaagtttttataagctcttaaaaatcttaacatttctattgcttcatagagcatgattatagttaattatttatggagtcaataaaggaatttagtatggcaattcttgcatcatgtattggttatgatgcttttaagaaagactctaaggaaagttagaagtcaaatataaagttgggaaaattattagtaacatttataacatacgaaggattgatagccctcatatataaataatgctgataaatcaataagtaaaactagaatgccccaataggaaaattcataaagaacatgagccagaaaatgacaaaagcgaaaaagcccatatatcattaagtatgtaaaaagacataccatctacttaataaaaaaatataatataaacaatcaaattatttttaactaccagataggcagattgaaacagtgataatactgataattttgcagaacataaagaaacaggaaacatcaaaagttgtaagagggcttatgacagaataaattgatgctgtccttctggtgcataattttttaatcacaaaatttaaatttaggagtaataatctggtaaatgaaatgatgtaagacatagttaaaacaggttttcaaagagggaaagtttaataaacacttgaatagtgatcaccataggattaataaaacttagggtaaatatttttaatgcaatatcatgaaatctttaaaattcatgctatagttatatacttaataccatgctgtaaagatagcactgatacatggttagattataagcaaagttttcaaatagagtatatatctgtgtgttacgtgtgcatatatatgtgtgtgtgtgggtatatacatacagcaatacacatatctaccaataatactaaacacttacatagggagtatgttctattcgaagttatacatatgggttgtctctaacagcactttatctctgtgcctatttccctagtctcatcctcataactagaactctaaatccattatgtatacacactgtgtgtgtgtgtgtgtgtgtgtgtgtgtgtgtgtgtatgtatgtgtgtgtgtgtgtgttttgtatgtgctataacatttcacttttgcttctatggtgcaatttttttcattggaaatttaacaacttactatttttaccgtcttaatttttaaacaaataagtcattattactcagtggcccttgaaatattgaggcaatatgtctcaaaaacttcttgttaggtgaatggttacattcactccttctttctttctttttttttttattatacttttagggtacatgtgcacaatgtgcaggttagttacatatgtatacatgtgccatgttggtgtgctgcacccattaactcatcatttaacattaggtatatctcctaatgctatcccttccccctccccccaccccactacgggacccagtgtgtgatgttccccttcctgtgtccatgtgttctcattgttcgattcccacctatgagtgagaacatgcggtgtttggttttttgtccttgcgatagtttgctgagaatgatggtttccagcttcatccatgtccctacaaaggacatgaactcatccttttttatggctgcatagtattccatggtgtatatgtggcacattttcttaatccagtctatcattgttggacatttgggttgattccaagtctttgctattgtgagtagtgccacaataagcatacgtgtacatgtatctttatagcagcatgatttataatcctttgggtatatacccagtaatgtgatggctgggtcaagtggtatttctagttctagatccctgaggaatcgccactccttctttcaatagaaaattattgagtaattagtatgtcctagaaactaccataaagctctttaccatgataacccaattgtggtttggagatttactaatgtatcacaatatgcaggttaaagactgctgttagaatgtgttactagtcacttaatgtttattaagtgccatctaaaccagtcattctagatctggttattaaatttcactatgttataataactttttcattccaatgtgcactgtgaatcagcaagggaacgctattcattgtggtcatttggaaacccagcctgatgaaacagctactatctaggatactcccagtcactccgcaaagggaaagaaaattctgaaaggtcttgtgctggcaattaattgcttgaactggaagtgacatatctgcttcagttcacaactcacgagcacaactagttacatggtctcacccaacttagaactaagaaatatattcgtattacatgtctcaaaggtagaaagctggaaataaatatgaatggtgttaataactgctacactgctaaatttatgttgtcagaaacatctaaggacaaaatgaactatgaaataaaaacatggccatgctctcaaaatttgttttttttgatatgaactcttcaagcataaaaaattaaattccaaaattgaaatcataaactaagttaacttgctaaaattcatggggtcaaatatgtgatatttgaatactcgctaatagaaatgtctcaaaatgcaataaaaggctttgggggatagtgagccctctgtcagagtagtgtttaagtatagactacctaatgagactggttgtaaaaggcagtcggtcacgggacacatggcttattaatatgttcacttactatgtactggaaccatatagctgtctaagatgagctttcttctcctttgcaagccttaaatccataattctaatcgatgggtcttgtggaatagtggtaactattatggaatgagagacagtgaaccaagcatggggaacatatatggccatattattgcccttaaggaatttacaaactgagtaagtagagaagatgttgagagtagttctaaatcctgaaataatttcactttacactcggaagaaaatccaaaacaccatcgtgatttgttccctataggtatcctaccttctttcctacccttaaccccatttctcagctccagatacactggcctactagcttggcatcaaatacgccaagcatactttgagttcagtgactttacacatgtatctccctcttcctggaagggtttttcccccagttattcatatggcgcacttcctttaccttagactgcaaagagatcttttctgactaccctatttgatatgccactaccattgttctgtcttctttcaaagctttaatttttttcctcattgtagttatcactactgacattacgatatttgcaggtcgtttttccctaatgagtaaaaactccaagaggaaaaggactagaatatatactaggtacataaagcatattgatcaaatgaatgaaagcatcacgtttcttttatatgccccagtttgcgattgtattgtatattctaagagttgagtgaacagcaatacttaagggagcagctgcccgtgaatctaatatattgttcagggttttgaagcaggtcctgcaatataaaccctgctgcagcacagttttacgtcatcttccttctcttactatgaattattaatcccatcaacctcatcgtaatagaagagttacgtataaaagaatgagtaatacaaggtgggatatgctaccttgtatttcaaacacatgtttgatttttccaaactaatttcagtgattggagagatcgtacaaatatggatatataaggcttattactagcgtgatgaatgggatccaagaatcggcagtttatgcatcctacaatggtccatcgactcgtactcaggaagatttccatagagtaagttcatcttgaacagagctttttacgaggcttagataagaaaagaatgaaaatactttaggtgggacatgatttcaataaatggtattactaaagccatggaaataaccctatgcttaagagatggacgaaacagatattttggaatctttgctgctctaagattctttatcgcctaatagcaaaaagattagataaagaggaaaactatcacttactggtcaaaggtagaaaatgtatggagaagaaatcagtgaaaagtgatgtaaaatatgtaactaggaaataaataaggctagagaaggtaccagaagtagatgagcagctgtggactgttacccccactcccgtctcaaatataaggggcgtagcctgagggttttctgttcaaaacaactttgactgtgtgtgtgtgtgtatgtgtttctgtgtgtgtgtgctggggagaaaggttggggtgggtggaaggagagttgatggggggagagagacagcaaacaatgttgaggctcaaaatgaaatttctatttttaagtacattttgaaaatattggcttatataaagttttcactaatttttgaagtaatattaaatatatgagtcttttaacaaatattgggcattcataatttgagatgtaatacctaattttgaatgaaataattgtttttctcaataaattaaagcataagaattattggagatttttcaccattccatgagaggaaattttagtagtgtacaaaagtagattaagatttatagacagcctttggcttggagaaacttactctactcagtgcctgaggaccagttgtgaagacagtcttatttgtgttggacaaaaacgtcaggcctttgaaaaaaacaatattcaaagtcagtattttgattgtatttgaagttcttagtgatgtttctaaacgttacgttaaatattagaaaaatattttcatggtcatatgtgtcatggtcataatcaatatgatagcttagttttttaagagtacaaaaatttaggccaggcacggtggctcatgcctgtaatcccagcactctgggaggccgaagcaggcggatcatgagttcaggagttcgagaccagcctgaccaacatggtgaagccccgtctcaagtaaaaatacaaaaatcagccaggtgtggtggcacatgcctgtattcccagctactcagaggctgaggcaggagaatcgcttgaaccccagaggcggaggttgcagtgagccgagatcgcgccactgcactccagcctgggtgacagagtaagactccgtctcaaaaaaaaaaaaaaaaaaaaaaaaaaaaaagtacaaatattagagcgaaacgaacatcaacaatttagtgaacgtttcttgtgtcagtttcagtctcagtatactgtgaaaagggaatgaaaaaaacatgtttaaagtgagtaaaattgattgacgtggtctttttcagcatgttttaagtgtttttcgctttgccaattaaaacttctattttattatttacctaaatctaccccccagtaaacaaaatagtatttccattttcataaaaggcagttccttttctttttcatcacccccatctttagagatctttgactttctattttttctcactgcctgacattaagattccttctgttaaatgtttttgaattacatttagttcataagaaatgtttcccctagactttaagaactttcggacataaaatttttcgccaattttgttcattcacttaacaaggacaaaaaaccagaaagagttgggtgacaatttccattcagtaaatgttctttactaaatctgaattgcatattgtggaatcagtaaatgtcaagaacaagccagtctatcttttcacaaaaaaaaaaaccaaaacctcgttgttactattttctattgtttttctagtttctattttatttacttttgttctgatctttattctttccttctattaacttcccctgtggaataactccaattataccatatcatgaagcaaaacatataactgtagaaatacaaaaggctcaactataacactggactaagcattggctgatctcccctagcatacctagcaatattaatcactcagataattaggcactgtcctatatttttgtaagatttataactttaaatttttcattacatatttttttccagtgactttgagacttatcttactttttagtgtgttaggtttatcagtggtgattttattgttatacatgacctcataatagttgttttttctttcagtacatttgttttatgtttaaatttttatatttacatgattaacttatgcaaattatatgtttaaaaatctgttttattgccaaagttgtaaggagggagtcaaagttcctagtcatttatttattagaattattcacaggagtgacaacgtgcgtaagtttatgttgaccagtcaaattttctcttcacaaaggacagaatgtgaaaagcacagattcttttttggtcatggggcagggaaagataatataactctgactgtgagagaatgagggaggagtagagaagggatcacatgttagtgtttattcttgtttcgtagaatgtactcatattggcctggacagttgccctttgattttaggagattaaaatatactaagcatgtaggcacccacccatacacacatacacaacacaacacacacacacacacacacacggacacgcaaacacagttgctaatcagtctgacttttatctgtaattctggttctgctacttactaaatgtgtgacttaaggtatattactgcacattgtgctcacttttgtctatttggatattttagttgacatttcaccttacataaaaaatgtgttgaaaattgttagcaagaaacaccatagggcatcatcatctgctttgtgatacataaaacatttgttaaaactgttcttttcttctgtaaggacactcaacagatttatcaaataaccattttaagtgtacaatacagtattattagagacaacgttgtgtagcagatctttagaatttattcatcttgcatgatgaaaattttatgcccattaattagcatttccccattttctcctcctttcagcctctaaaagccaccactctaatctctgattctctgagtttggcaattttagatacctggtgtgagtagaatcatgaagtatttgtatttctgtgtctagcttttttcatttacaatataccttcaaggttcatccaacttgtcacatattgcaagttttccttctttttaaagactgaataaaattccattgtatgtatttaccacatcttctttatccattcagctatcgggcatttacgttgttcccacatcgtgactatttttaatcgtgctataatgagcactggagtgctaatagctctttgagatcctgatattttgctctttttttgataaaatggcttcataatagttatttcctcatatcattattctaaaaattgagctgctaagtataaatctgatcacaaagtaaacatgtaaatattattttttaatcacacatgaaggatttttatagtaactttgtgtaaaggtgggtattttcttgtaagttattggaatctattaattttaagggagcattccaaattttaagaggtagaaagaaacaaaattccagtgcctatgtagtttatttcattttaatttaaattatgagatgattgaatagtgttcacattagaagtataggaagatagtttagaggtcaacttctttggtcttgtatttctttttgttaatgaaattaatgtgtgttcagtggaaatatgcacatgtgaatatactgttagtttctttaaataaattatatctccaaatgatataataccatgaagccactacaaagttaagatataaaagagtttaattgcatggcatatttttacaatacattaaataactgaaaatgtagctaagacaacattgtgactggttttgaaaaaataaattatttgtgtggttatacatctatatatgtacttagaacaaaggttatattcagaatattttacactagactcttttcaattaattttataggagtttcatttctctgaattttcatttgtcagtgaaattacatattttaaaacatgcaaaaataaataaaacatgtaatttaaaaatgtaaaactcttttacatatatttttaaatgtcaataaatgaaaaactcttacatatatttttcaatttcaataaatgaaaatcaggaaaatagtgacatggtcttcaaaaatcacaatttaatagagaaaactgaagataggaaataatattctaattacggacaatgattaacactggcagaactggtaaatagtacactataaaataaaatactacattaagatatataatcagaggacatcatacctcaatacatatgtgtttgttttgttttttaaagacacgggctaacattactaattactgaaggatggagaatgttaactgagcttgtaatgataagccggtgcagataaataaaatggtataacaatcatcacagtttataaaaccctaagagtttgttaaatgtgcataatagcgtccacaatcccgctaacacaatctccaaacatttttgtgtacacatagtgtaaaggatccagaatttcaatcatattctcaaaagaattcattgccccaaaatggcaatgaaattctgagaaaaatagggtatggtgagactctgaggacttggaaagccaggcaaaatactacttatttctatggtacagacagataagtcctttatgttatattatccatgttgaaaatctggtagattgggaagcaggaaagaggtttcatgtttcagctgcaaactttgtgttcgtggaaagacaagagcaagtgctacataagttgagccattcccagaacaggtagtgaaagggctctattgcttcaactgaagaatgtgttatgctcttatgtataagagggattcttcacaccttataaaatgttcatatcccttttacgtgctttgtattatttatgccccagtgagcttacttgtgagataaaagatgaaatttttaactctgtcaactaaaaacaaccttatatatcttgaatgagttgaccaaagtagtatggttagaaactgataggtatgtcactcaacccaagttttccaatttctgggctctgaatcattttattagcctaagctccttcctgagtgttgatcttagataatgaaccagttactcttagataatgtctgtgatgatgaataatgtcacaaaaattactaactgatattggacaatcattatataacaaacattgctgtaaacacttttcatacattaattcaatgtttataacaaccctattgagaagattctgttaatatatccattttacacttgagaaaattgataagctggttaagaaatctgtgcacagttatgcacatgaaaagcagctgtgccaggatttgaacacacacacaatctcattccagaattgattctattaacctgtatgctaaaatgacacaacatagagctttatgaagctatcattagaggaaaggttgggttttcataaacacacttatgcacacacttcatgatttactaaaagtggatgaatatataagcaatataatgacaaattataaatcaggcaaccagaaaataagaaggtaaaatacaggcaggtttaaaataaaggttactttataaaatgaaaggtgaagtttgggaactggtaatgaggaagaataattgctgtgaaatctatcaacagatgacttcattaatcttttttccttgaaagagattcagatgatattaccatctctttcaggagtggaagagagagaattggagagaaatgttttaaagattctgatttatagcaagcctgtgaaaaaatggtgcattaaattcccatttggcatcctagttgtagtaagataatacatcctttctaaaaattccatttgatgaataagcaaaccaattcaaaatgactccattttattgataatagcatcagtgtcattaatgagaatgctttttgactaacagcaattaactagatttggtgaactgagcaattgaacattgaatttgaaatcagaacattcggcactgaagatgatataagtacatattagaatgattgttgattatttaaggatttattaagttgatgaagaacattaaagtctattatatcctgtattatttaggatgcttggtttcaaatgtactcaagatacaaagagaatttgttggctaagtaaagagttcaaggtttgctcaagggtttaatacagagttttattatggatttaaggagaagtctttgcttctctgttaatctaagcctaccctccataacttttcgaactcatacagaccggcttccctcagcagatcttggaaactcttttcccttgtttacagctaaatgtaaagaatatatctttacccaaataggaaacaaaaggtctgagtttctctctgcttggaaactcttagatcatatgcctggcctgaacacctccctgaagcaaagtacatagcagtatcccacttggcttgcacaaaaaccgagcgcatatctagaactgagagtaataacaatgctttccaaatcaccaggctactgtgccatcagagagtagaagaaaggatattgactgtataattgcagtgcttactacagtcctcctctttgaatatccaacattgctatacacccttcatagcatatattcactttcaaagatgctcagactcctcaaaaagagcaagtataaaacattatccagtgattgcattcagctccaaggttgggatatctgggtgattagcagtccctttcaattagtctttatgatccatccagtggactatgactaagtgaaaaaatttgatgtccagtactgctaagtaaaaagttagaagggcacatcctgattaaaactaaactaaatttataaaagaaaccaaattgaaacagatattatatcctgcactttcagagccttcctggtgatttttccttctgttcattataaattttgctaaatacttgtcttcatcatgatatctgaagttgacatattttggggttttgtgttactttattattctacttattgtgttgtttaaaagtcctggtgcttgccctaggtttgagtgataacaaggtgtttttagttagacctggggtttctttggcaatcagatttgtttactatttataggctttcagtatttgttcttatcaattccatgacccagtaacccaaattctatgatttggttttaggcttcaaatgttaacctcttttgacatctttaagaggcctctgtgctttgcacaatcccctgactgagaaaatttgcagcacagggttggggtagagggcatagccaatctttgagtatatctttgaagtatagattacatagaagctgcttcttcatgataggagggatcgtctactttgtcacaaaagtgctttagggaagcactatagttgattttttttagtacttaagtcttacattctgcctctcctgtctctgttcatacaaacattcgatttggagtaaaaatacaaattggcttttccactcatatcaggctccaaattatcagcctctcaaggcgttcacgttataagccacaggcagagagggcttcttcagacaaagctatattttcttttttttctgtacttcaaaaacaagtaaccattagcatgaggttttttctttcttggtttaaagaggccagtaggtggcaacatttttgtttctatcaaatctcctaatagtgttggtactcgtaaggcacatgacttaggataaaatagaccattgtttaatcaactgttttttaatcatgtaccaagtatcattttgagttggggtgggggaggtttatcatccttgtcttctcataattcagcctgttccacattataggatctattaactttcaacaacccacttcctgataccaaagtccatataaactagaatgatgtttggtacaataatggaaaactcttctcaagaaaacttgaaatatgcagacacacacacgcacatgcacacacatacacatacacacacatacagaaaacatccacattggagcagtaacatgtgacatcttttcttccattaaagatttcttgtaattaaaccttgggaattattggcttatgtaacagaaaattccaaaggaatggcaggattctggtaagcctttaatccaaatattcacattgtcatcacactgcagctccgtatctcagtggctcttttggctcttcactcttccgttatctatgccaggtagttatttctttccctatacagttttgttatgatagatggctgccagaactgtaacatttttttctttgcttatgtcaaaggaaaaataagtactttttttctcagtcaagcagaactctggacaccttctggttggaacatgttaagtcatgtttccacagttaatatactgtgttaaagcataaaatgttgtagttggatttttgttctatgtccctggcaaaaaggatttatttaaagcaatcaggacttatgcatgggattggggaggtgattaattgctcccaagccacaagattccttcataaggatggaatatagtttggaaattattttatggtagtatttgaaagagttcagtgttttcccatgatttaataatataaatccttaatagaataaaatatatcatgaattgcaagtgtatttgaaagtgtgtgtgtgtctaattttattggatccagaaaatatgctctattttttcttggaaaatgctgtgttttatatccactgcattttttttatgttctgtacatttcagttggatttctttcaaagggactgccctctatcaatcaaagtcatctttagcataggttaggctattactgatgaatcaaatatttctagagcaatactttaggacctgtcccacaactaatatattcaaaatttagcaaaagtttattgagtacctgttagaagcaaaggactatgctaggtgttctcatatacatgaagataaatatatgtcataaaacaatgacaaattggctttcagaatgtgcttatttccaatatcatcatatttttcttttctgtcatttttcattttatcatataaagaccttgaggggtgttttttcagagaaacaataaaccaatgatggatgagcccacttgagttagttacatactatacagcttatataaagcataagcatataaaaagtatatgcatctactttcatagtttggattgttatttaaatttggtggtattacattttcttctcacagatgactggtcttaaatgtgtactatagaatttacagaaacaaaccatagggtttaataagctgaataaaatgaagctctttatctggttagattactttgtaaaggacaagaataggggagcctcccaggtcaacctgatgtatgattttccatttttctaaataagttttattgacttttacattttaatggaaaatgagtaattagcagaggtgcagattatatttggcagaaaatgattataatatttttatcagagagtaaaatatatgcagaaatagccaagtaatctgatttgttaataataatagtatcctgattatggttttatcttttgttttaaaataacatttatatagggtcaattttgaagataaatgggaacctggtgaactctgtctctttttctcagagtgtgtgtgtgtatgtacataaatttaaaaatcgaagttatagttaattggaataagaagtttgttgaaaacagtttgatgtctggtaattgagaaatgtttatgaatctgacataatttactaaataatggagagagatacattattcagaacattatataagtacctaggccaaatttctgaaagatccaaggtgagagatatatgtataattatcttggtggtaatttactcatgagtagtattgacattgagatattaacaatttgtaccgacccacttgtagctgagtatatattcttaaattgtgttccaacataaactgtcatctatattggtggatctttgcgatgctttgggttaggtcatcaaaacctaagcaaaccctggggaatgtactttatatgtatattattctcccactcacacacacacacacatcctcactgtttagaagtacacatttgtcaacattacaatgcttttggcattcacagaatctgttcaaattagtacagtgttcactactgccatagcaggaaaaaaactgtacttttgaatcatttatttttaaatcatttgaagtagaaaattctgacaggttgcactgatgaatctttactaaaaataaaggtctttgtttacaaataattacatcttctcaaccagtggtttcatgttgcttactttcttaaaattccaaatagaacaaggtttgcaaaaatcgtcacatatacatgttatcactgttgactgttttatgataatttaggtagcattcattgtacacttacaatatggcaggagcatgtggcagttacttgaatggcaatatttatgaggtttaccaccaatcaagcttcccactatacagattaagattaagacttactgaagggtccttgtgctagtaagaggcagagtaaaatagacctaggcatcttgaattcctaaacctatgatttctaagttatgtcttctggcctttgtgttaaaatttatttctaatcaacagtgatacttttaaaatatacataatagtgtcatatgtgaaggtcaaacactagtaatttaatctgtcaagtacttactgatcatctaatttgtgttaattactgggtgttacttgacttgtcctcaggttctttatgcactagagaggagacagacactcttacagctgctttaagacacagtagagataggaagtataataacttttcatataaatcctctgggaccataaattatagcttcataaatcttggcttagcaggtagcagaaggtataactgaatgatgagccttgatagtcaagtatgatttttataaggagatcatcccatagaaatattacttcactttgtggagctaaatgagaaagaagcacgaatcgtcagttcattttgtgactgttcgtttcgtgtgtagggcatatggttaggggaggaggagtaggagaggcggctggaaaatgaggttgaaggacacattgtggaggattttgcatatcatgctcaaggagatacattttattcagtaggcaagagaagggcattggcaggttttgaataacaagtcatgtgtttcaaccctgggacttatgaagctgaatggagaggcactttgcctttaggaaggattgccaaaaaaaaccaaaaagggccatgctgagttgaaagtgtcaaggttgcctccagaataagctaactgtatttggaaatcagggtttattatcaacagatcagttaagaccagtgatagaatcgcattgcaggggctagggtggagagagataacagagtaatcccaaaaagtacatgaaatttcacagagaaaaaaagtacaatcaaatttgaagaggttcaaggacagaatatttgattgattgttttgttgatcgatctatctatctgtagggaactagaggtgggagacatagttaggtacgatttaagagtttccttaggaaagtaccatcacataacagatatttaaaaagactttaaagaaggtagttatgttaaacagtgctgcaaatgaattgaggaggatgcaggtaggggaagggcaactggatctactgttttagaagtatacttgtgtgctgtgagagggatttttaagtataagtgtggaaaacaagaaataatacatagaattacggctgattatgggaaactggaaggaggaaagtttaatcaattctgaggttcagtgatgaaagtaaggaggagatgggatagttcatagaagaatgatgttaatatttcagattgggagagaattaagagttctgataaactcctaattttgatgatacactctgtggtaggaatctacagtacaccgtaaattcctgtgtataacatacaatgtgctatataaaatatgtggtatcaacctataaatgttgatttttcaggacaaaaatgtccagaaaaatgtaatgaacattcagcatacagcttcgataagaagttttaatcccattagtatttaactaacatactcccatttttagtaagtgattattattagtattgattcctacttaattctcttcaatgccgtagtctctgtattttcctcccttcattaaaaaaaaaaaatctttcaagttcaagttttatcagagagcaagatggcatagggaagagagcagagaccatgacatcactggaacagtttaacatgatttgattttataaaacatgataaaataagtatcaggcggcattttgttttaaaacacttgctgctggaattccactattcatatgataacctgctgatcagtaggactctgtctcctgatgccaagtttttagcaccttctacagcaatgtgtgaataatgcagagatgcgaaggaaccttttaagccaacttgagaaacaagccctgtcaaaaacatgatttctcatgactgaataatgcaacagactattccatttagaaaaacatcagtaaatagtctgagttttgatagtgattacattcttacacttgaggtaaaaaaaatattcttgtctcagtccacaaagttgataggcatagggacatatgagtgtatacactgagggtgtttaacaatgaaatgtgattcaaaaatataacaagatttgataagcaaatgggccagcaatttgaaatgcttcaaattatacttaggctctgagatgaaatgtatgtcatttaagtgtacttttttttttttcccgagatggagtctccctctgtcgccaggctggcatgcagtggcacaatctcggctcactgcaacctccgcctcctgggctcaagcgattcttctgccttagcctcactagtagctgggattacaggcacctgccaccatgcccgactaatttttgtatttttttttttttaaatagtgacaaggttttgctatgttggccaggctggtcttgaactcctgaccttaggtgatccgcccgcctcggcctcccaaagtgctgggattacaggcatgagccacagtgcccagccttaagggtatttttaagtagctcatcaagatgcaattagatttaccattatctgacttgagtagaaaactggaaaaaaaaaaaaaaaaaacacaaaagcagagaatggtgagaacttttaagcgaaggtgtagccgacccagtgtcaaatagacaaaatgtagaaaagacaaatattatacatgtgatcttttctgtcacataatgttgacccctaggatttccatcttatgctttcagtaacagtaaactacaatatttagtgcagtattagatgattatcatgtcctaatacatttcctccataaaactagaagaatggcacttaaggtccaatgaaatatgatggttaaatataatatttgtactcccttgttggtgttgcttaatgcatttcttaatcctccaatttatcgtgtcacacagcactaagctcaacaatttattcataaagtggctgcaaatataatttggaacaaacttttttttgttcaatataatttatttatttattgcttgtataatcacacaaaagtgtgagttccatgaggacagagacagttgtctcttctgtttactacaaacgtcttccgggccagtaataaccagaagttgttacctgttaaataaactgaaagtcaaatgtagggtgatttctacgcatgaggagttctagagctcattgatgtcatccaaggtttaaattcttagtgtaatgtattctaggctcatccatgttgtagcaaatggcaagatttcattctttttttaaggactgaataatattcaattgcatatatgccataatgtctttaatcatttatccatggatacttaaacgttgtttccatatcttggctactgtgaacaatgcttcaatgagcatagaagcccggatatctttacaaggttgtgttattttttcctttgtgtatatgcccagaaggagggattcttgggtcatatggtggttttgaattccttgcctcacaaaaccttgctttgtctttgcttgctgtttttttttttttggagacagattattgctctgttgcccaggttagagttcattgacccaatttcagctcactgcacccctgcctcccaggttcaacgattctacttcctcagcctcccaagtagatgggactacaggcacccaccaccacgcctggctaatttttgttattttagtagagacagggtttcaccatgttggccatgctggtctcgaactcctgaccattcccatcaatgatagactggataaagaaaatgtggcacatatacatggaatactatgcgaccataaaatagaatgagttcttgtcctttgcagggacatggatggagctggaaaccatcattctaagcaaactaacccaggaacagaaaaccaaataccgcatgttctcactcataagtgggagttgaacaatgagaacacatggacacagggaggggaacatcacacaccatcgcctgtctgggagtggagggcaagggtagggagagcattaggataaatacctaatgcatgcagggcttaaaacctggatgacgggttgatgggtgcagcaaaccactatagcacatgtatatttatgtaacaaacctgcacgttctgcacatgtatcccagaacttgaagtataataataaaaaaagacacctaggaatcattctcaacaactgtactgtccttgtcatatttatagtgcccacgtccaatacactctaagatcatatatgtcagaagtctgtcatctccccctctttccctacttctgttttgttgaagtcctcagtatatatctcatcaattcattttttcaacagttcttgagttcttatggcagcagtcaggttctgactattacatactgtcattcactggatatctaactggtcttgctgccctcatcttccatagatcattctccacactgcatccagaatgatctttcataaatataaatgtagtaccaatgttcatggtttgactgtcaattcccccaaaagattaccgggaaaacacgttgatgaaacaacgctgagtgtattagacatggcgccataagggaagacactaacttgacaaggtcttagtagtgtgtaaaaattcctacttctcagttcatatttcgcttcccttttcaatgcttccatttcttcttggacgtgttcttatgagagcacatatattttttgcttacttgtaggtttcctccactggactatgatttccttgagggcagctcttttattctttatatccattgtgatctaagtgagtgattaatacatagttgatacatgaatccacaatatgtgctcattttagtattaattgaatacataagacattgcttcttaagtgtgccttaattggcacaataacaaaatttgttgaggatttactgaagaccaggttcttccatgctgtatgtatattattaacatgtttaacttagcttaccaacattaggagtttatattcttgttattcccattttcagacgagaacactaaggttcagtggtacagaaaagaatttgagtctagatattttgattccacagcccatattcttaattctcggtacactacacttctctagcatgtttgataatatattggtaacactcaattgccaaatgtattctgcatatatcacaaccagtatcctgatatatgttggttgggttatgaaatgacacataatttgttcaacaaacatttattaagtttttacagtatgctagccacaatgtgagattccttatatgtactacctaaattaagtaacttaagtaaatgtaggaggatttgagacatgcatttactttcccctctttgatttctaaggcaccacacattccaggttttcttcctgtttttctagcatctgctttgattttaatttgctggttcttccccatcaacacaaattcctgatatgacagtaaccaggggttggttcttagaccacattcattttctcgatgatcttatctagcctcctggcatcaaatactgtctgtaagttgatgcctcccaatgtttacccccagctcagagctttctgccaaactccaaacttagatacacaactttttatacattcctagtcaattcaaatttaccctatgtaaaactaaatttactaacacccacatctgcttcgtcaatagtttttcctgtgtcagtaaggtttcactatagccttccagttgccccaaatgaacatctttgagtcaaacttagtcttgttctttctcacacctgatgttgttgattagaaaactatgccaggtttggccggatgcggtggctcacgcctgtaatcccagcactttgagaggccgaggcgggcggatcacgaggtcaggagatcgagaccatcctggctaacacggtgaaaccccgtctctactaaaaatacaaaaaatttgccggccgtggtggcaggtgcctgtagtcccagctactcgggaggctgaggcaggagaatggcgtgaacccgggaggcggagcttgtagtgagcggatatcgcgctactgcactccagcctgggtgacagagcgagactccatctcaaaaaaaaaaaaaaaaaaaaacctatgccaggtccaccttaaccaggtatatatccagaatctgatcacttctgactacttacatggccaccaccatcacctctggtctaaattagtgaaatagccttttaaacaagcctgcctgctttggccttgccttacctgtaatccattttgtctgccagatggtcttgttaaaacgtaaggcaaatcacatcactcttctgctgaaaaccttcccatgccttgccagacattcagtaaaatgcagtcctgctgttttataagcccatgcacaatcacctcctcctttctctatgtttcttctctggcttccttttccaccgttgttaccgtctctcattccaccgcagtcatagatgcctctacctggaacacatttcctccacatactcacatgacttactctctcatatctttaaatctttttctcaatgatattttccctagtactttcaattccccttccttgcttccttttctccataacacttacatccttctattttacttatttctcttgattagcatgccttcagtgacatgattcactgaatgagaacttagatttctgtctgttttgtatatggctatatcatcattgcctaaaatagtgcctggtcctttgtagttgcttaataaatatttgttaaagcaacactatttgtactaagtgacagagccagaattccatatgattttcaagctcttctctataaaataaatgaagttatgatgtattgaatgtataaaggctcttttgttagttgctcttctacctggcaagtctgtaattaaaataattttgtaaaaaattatctatttgaagtttttttattatttgttcaattgccagtagataggctagacaaagataagtttaccaattgattatggatatcttacattcttattaaaaagcaaaataataatggatataacacattattattttcatgattaaggatatatcacctctaatgagtagatactaaaagagccttaattttctgattcccttatttctcctcaaggcaaggatagatatccctgtgctgatggcatcgaatgcattggcaagcctaaaatcaaacaagctttctagtagactccactcaagattatcatcaatcttcctttgcaaatttggttttcagtttttgtcttcacattgaaaaatagtcaatatattggcaacaaatgtaatgcattactcaatggcaggtgatatcgctaaagatggtcaattacatgctaaaaacaaaggactttgaggtctgttggatgccaaaacctacagtcaattcagtcaatatttttgacagtacagagggaaaaatcactcaaggaaaattgccacagtatacattaaatatctttgtttatcccattttagttattttgtgtgatatctctaaatgctgttctgtatatgctgctgacaaggagcaaatttatttgtttagaaattctgcagcctttccatcctttgccttaactttcttgttgaggtactaatgagctgtgaaaggccaaatgaaagagaaataacacctccagataatctgtactctgataaactactcccagaataattgggagtttatggttgttgtagggcagtggaagaaataagcaatgttggccaactatacggaacaacccgtgttaataaatttgtaaaagaagtttacaaggcaatcacaatcctttcaaacaaatgtcatgcatgtactttcaggcctaggcacaatgttattatctgaaaagcttgataggtaggattgtattttgtcccactatttctaaatcaggaaattctaagcatacttgtgacgatttctcttttaccttaaatggcttccctattccagatttacagtttctgcatgagttttctactcaatttgcataattttaatttacctttatgttaaggtttttgaagagctgccgtactttcatatttggagtttaacatattttaatttatggacgtggcaataatttgatgacctttttagtgtaatataaagcctatatataaaaacttccaaatagaatatgtactgagtttgtaggaaatttataagtattatgcaaatcaagaatatggtagctgattccactagaggctattttgaaaatataaagaaactttgtttttaaacatagtattgattatctcactatgtgacaaaaaggtatttctgtttattctgtttctttccatttctgctttccaaagtagaacaaataagttgaaatgtaccaatgggtgtgttttaagttttgacaggtttcgggtatgattatataccaacaaaatcccagtaatatttgctgcatatttcattgtatctatattttatgtactgatttaaaatttaaaatgtgagtaaattttaaggcattgtgctaatgaaacttatggtagttcattttttatttttatatagacaagctatctgtttagaatgcaaaaattatatgccatatacaatcatattataaacatataaaattggtcacagaaatttctaagggtgaaaaagactggatgaatcaaagaaatctatccacaattctgtgagtgtatgagagacttagaatgatcacattcacataaaatataacacattattatattttgatttttaaattaaattttataaatctagctatctctgggaaatgtttcttccccttgagttattacaaaaaagtctggcaacaagttaatattcaggatttcgtgagacagatactgaattcagttcccatctctgctttttattagctcttcgaccttgggcaagtttctaacctttatgaatcaggtctcctcatagtaaaatgtagacaataatcatcccttatgttgtgaggttaaattagatgatttagtggagtgcttacaccatccctcacaaatggtaaacacttaattcactatacttcagttctggtggtaaattctaaaagaatttagatgatgaagacagcattataatttaaagcacagtctacacagtggatagcacccacttaggagatacacacgatgaactggggttctagaaggacatattataatgtctcttcacaggcttatttaagaattaagaaagaaataaactttaccaatttttaatatacaggttttcagataatttgatgtaatatatggtacttgatatcttctgtggaaaatcagagatccttaataggatgcataatgtcaggcctctctcttatttattagcgtttttggtgctcttgatgtgctgctatgtctatgaacactaaagtgtgtttatagattatgttatcttaagtagtagaatacttaaaatctttgtcagcaaaatcagagtaacctaggaaatctattttactacacagaaatgttctggacatctcatggcaaagtagttgaaaagattgagttatgtactttatttttgaaaaggtcaagtgttacataaatgctgaacattttcaggttggcaagtggctgtgagtactatgttatttctcaaattatttccaaaagcagaaaaaaaccttcaatctttgaaggagaagcttctgtattaacaatattaagaaagagactagattttataagacattcatgctatggagagagcattttaaaaatggatatttggtggtagtcccattataaataggtcagttataaaatattctatacctacagaaaataaatggaaagaaatgtcaaatctgtttaaaaatattataagtgaaaactttcagtgaggttttgtctctgtttatgactttaggacgtttactttctatgttcacctcacttagggttctgtttcgcttttctgctcatgcttccatttcctcagttggtaatatacacatatctgtacatatcctttaatcctcttctagtatcttcaccaaatcagaagtgattgctcttatcacttagcccaccctgattttgagttttttttttacttgaaaatatgagaagtaatgttagtataacaagagatggaaacttatcaaaaggtttcatacttttatttttctgaaatgcaaaagacttactgcgttcttctcagttctatgaaccctaagatcaaaagctttagttgtctatgggacacagagatacagaccctgaagcatgattactcctattaggagccaatgataaaattgaagaactttccactgctttcagccaacaggatagaggacttttattactttccttgaggcagagggtggaatttgcaggtgttaatgaaatctaccagagtcttcccaagaattaataccattctttgaaatggcaggctctgaagacctttccttgaataggaaaggaataggaagagattccaagaatctctttccttgaatagggaagccaacactgcattgaagaaggcagtaagtgaaataaacaagtggagtttgtgtcatttcttgtccctgctctgtcatggaaagatgccttggtctaattctcttaggaaaaaaaatgtcctcatatcagtataaggtaaaatggaatattgttacatgtcatatgctaagagacacattattgtattcaacaaacatatagtatgttatactgtatgtcaggtgctgaacaaaataaactgtctactgtcgtgaggcttccgagatgctacatcacctctcataaaagaacttccccatttccacaatcacacccttataattgtcttcctaattagctcactagttatttatattatttccctaattttaataatgaaactatcccacagaagcactatagatgcccaagaagtagagacaggaagctacccattagttcccccatagggatttctctcccttatgaaggatataccacatctttgtttaaggaataaggaaaagagacaaaggtatgtaacataaataaagagaaagcacacagaatttagtgatatatgtgaaaggtaacgggataaaccaagcaactggtgtatgttaaggaggtgaatatagctaatgtccttggagaaaatttacctagttagaaaagatgtgtcaatttagtagaatatttttacaacctaaaatctaattgaaccaaactcctctttattgttgttagttctctattctgggttgcactaaataaaaacaatgaggcagtgaaagtgattttataaaagttgaatggcaaagggtgatgctgaatgtcaatacaatcgctgtatgttgtctgtgagccttacaattaccctctaaattagtatcatatctattttcaggtgtgtaccaagagtgtgaaattaaaaaactttgccaagttcaagtacacactacctataaattccagaacctgaatttgacctcatgtttattttactccaaagtgaggccgacttaaagtttcccgaatgcggccactggttttatgcagcatgatttctttgagacattgttatatacagcaatggaggtagggcagggggagggcagtgagatttcagagatggctagcttggacatgcaatagagtgggaaagtgacccaatgagaatcaattggagggggagagattggagagaggaaagataatcaacagtgagaagttcagagaaattagtttaaatgtgggaagcaatttcatcatcaggagatagcaatctatggcctgagggtgaaaatagacttgctacctgatttttgtaaataaagttttattggaacacatccatgtttattcacttaatgtattgtctccagatgctttggggctacaatttgcagtgacagagctgagttgggggcatctggtctttagtggtctgcaaaattgaagatacctattatctagccctttacagaaaaaagcttaaggttaaggagtcttggatcaaataacaggaagaataagattttcactgaaattagtgtaagtgtagataagtttctatattttggggacatctcttgtgctaacttctaatttctttacatatagacttgtggaataaatgagtacatagctaagaatattataaatgatgagaaaaaaagcaaaattccaaaacgggctacatgggaatatttatgtttaggttctcctcatagctcacaattaatttgtatatgcaattacaaactctatggactacggtcattctagaggaatattatttaagtgcagtatatgtcaatttgaaataataagttttcacgagatatgtgtattttgttttgatttttttggtatgtaaaaaccacttgtctaaagcagtttacttctgaattattttgcattttaaaagtatccagtgaatcatttttttcctatttataaatgactgattaaaataaataagacttggtgtttttccatgagacgtatttgaaaattaataaaattgttaaacttaggattaaggaaaataacattaagaatttatttggtcttctgagacattttgtaactatcctattttaaattaaatttagtacttttacaaaatctcgtttcaattaccaactcatatgaattccaaccaaatactgacttttaaaattattgaaacatccaccaaacagtacagagttattatgttcatccttcttctctggacttcatgaatctctgtcagccaaggaatgtcggtttgtttactgggtatcccatttttcctcccacacctcataggtgtgacttggatttcctcatcctcatcttggaaataggtccccccttttagggtgtttgtaagaattatatgaaacagtaagaacaaagaaatcactaggctagacgtctttcatgtgccatctaataaatttctgagaaagtttttttattgatgcttatgaaaattttattataaacttgcttttaaaaagaaatcttttatattgggttattaaattgttctaggtacatttctctaaatcttctattattttctctctgaccttccattgatttaggagaatttgccataacagtgcttatttctttttcttccttcttgattttatgagaaaggttctattgtgtggattataatagccaagacagaaagtctcaggtgaagtacaggaaaaaataaaggaataaaatataaaataagttagaaagtaaatgtatacccaaagatataaatggtagaattagagaaattagaggaagaaaacacacacacacacacacacacacacacatataagttggtatactatatatgtatgtgaatatgtatatatgtataaacacatatgaaatatgaataggaatattgggaagacatatatttgaaactatgaatattttatgccatattactccattttcaaggtattgattggttaaaacatattttatataaaacctgaaattggaagcacaaatgaccttaaataagaaattaaaattaccccaaacaatttagtaaatatttattatctgtgtactgtgctgttaggcacggggtcagtgtccccgccttcctacaatgcaagggttagtgtaatatctaaaggtatgtgacttgaaaaacgatgaagcaaaatgactggaaccttcattgagagtatgttttagagagacagagtagagttttagagagacatctgattttatagtagaaagtttattttaaactcacatataagcttttacagatacatttttatagtaaaatctcagctgctagaaaattagagtatatcagtatatgagattgctgtaggtttcgtggcactaacaaaaacacaaggatggatgaactaaaaaatgagtttgtttctctttcagacttacttctcttaaatgttgtgtagatgggagtgatggaggccttgtaggaagtctctgctcattcagggatccatagtcctgttgcccagtttttcgatcatcccctgggacgctgtcttcgtagtcacggttgaggatagctcaccagcttcatgtgtgtatcacgaccttcaggagggaggacgaagaagagagcatatctatgcccatttacgtcttaatgacgaagttggatgcgttatatccaactggccaatacttggttacatgccacatctaactgcaagggaaagtgggaactgtagtgacatttctagatagccaaattgtcccctaaactttctaatactacataaagggtgaagaaagatacatattggaggatgagcaatctttgccagagccatttttttaatgtaggaattaagattaatgtttttcaaaaaaaggcaggggttgcaatcctagtgtctgataaaacagactttagaccaacaaagatcaaaagagacaaagaaggccattacataatggtaaagggatcaattcaacaagaagagctaactatcctaaatatatatgcacccaattcaggagcacccagattcataaagcaagtccttatagacctacaaagagacttagactcccacacgttaataatgggagactttaacaccccactgacaacattagacagatcagtgagacagaatgtcaacaaggatatccaagaattgaactcagctctgcaacaagcggacctcatagacatctacagaactctccacccctaatcaacagattatacattcttctcagcaccacatcacacttattccaaaattgaccacatagttggaagttaaagcacccctcagcaaatgtaaaagaacagaaattataacaaagtgtctctcagaccacagttcaatcaaactagaactctggattaagaaactcactcaaaaccactcaactacatggaaactgaacaacctgctgctgaatgactactgggtacataacgaaatgaaggcagaaataaagatgttctttgaaaccaatgagaacaaagacacaacataccagaatctgtgggacacatttaaagcagtgtgtagagggaaatttatagcactgaatgcccacaagagaaagcaggaaagatctaaaattgacaccctaacataacaattaaaagaactagagaagcaagagcaaacacattcaaaagctagcagaaggcaagaaataactaagatcagagcccaactgaaggaaatagagacacaaaaagccctttaaaaaatcaatgaatctaggagctggttatgatcaacaaaattgatagatcgctagcaagactaataagaaaagagagaagaatcaaatagatgcaataaaaaataataaaggggatatcaccaccgatcccacagaaattcaaactaccatcagagaaaactgtaaacacctctacgcaaataaactagaaaatctagaaggaatggataaattcgtggacacatacaccctcccaagactaaaccaggaagttgaatccctgaatagaccaataacaggctctgaaattgaggcaataattaatagcctaccaaccaaaaaaagtccaggaccagatggattcacagccgaattctaccagaggtacaaggaagagctggtaccattccttctgaaactattccaatgaatagaaaaagagggaatcctccctaactcattttatgaggcaagcatcatcctgataccaaagcctggcagagacaaaacaaaaaaaagagaattttagaccaatatccttgatgaacattgatgcaaaaatcctcaataaaatactggcaatccgaatccagcagcacatcaaaaagcttatccaccattatcaagtgggcttcatccctgggatgcagggctggttcaacacacacaaatcaataaatataatgcagcatataaacagaaccaaagatagaaaccacatgattatctccatagatgcagaaaaggcctttgacaaaattcaacaaccttcatgctaaaaactctcaataaattaggtattgatgggacgtatcttaaaataataagagctatgtatgacaaacccacagccactatcatattgaatgggcaaaaactggaagcattccctttgaaaactggcacaagacagggatgccctctctcaccactcctattcaacatagtgttggaagttccggccagggcaatcaggcagaagaaggaaataaagggtattcaattaggaaaagaggaagtcaaattgtccctgtttgcagatgacatgattgtatatctagaaaaccccattgtctcagcccaaaatctacttaagctgataagcaacttcagcaaagtctcaggatacaaatcaatgtgcaaaaatcacaagcattcttatacaccaataacagacagaggcaaatcatgagtgaactccattcacaattgcttcaaagagaataaaatacctaggaatccaacttgcaagggatgtgaaggacctcttcaaggagaactacaaaccactgctcaccaaaatacaagaggacacaaacaaatggaagaacattctatgctcatggataggaagaatcaatattgtgaaaatggccatactgcccaaggtaatttatagattcaatgccatccccatcaagctaccaatgactttctacacggaattggaaaaaactactttaaagttcatatggaaccaaaaaagagcccacattgccaggtcaatcctaagccaaaagaacaaagctggaggtatcacactacctgattttaaactatactacaaggctacagtaaccaaaacagcatggtactggtatcagaatagagatatagaccaatggaacagaacaaagccctcagaaataatgccacatatctactactatctgatctttgacaaacctgagaaaaacaagcaatggggaaaggattccctatttaataaatggtgctgggaaaactggctagccatatgtagaaagctgaaactggatcccttccttacacattatacaaaaatgaattcaagatggatcaaagacttaaatgttagacctaaaaccataaaaacctagaagaaaacctaggcaatacctttcaggacataggcatgggtaaggacttcatgtccaaaacaccaaaagcaatggcaacaagagtcaaaattgacaaatgggatctaattaaaccaaggagcttctgcaaagcaaaagaaactaccatcatagtgaacaggcaacctacagaatgggagaaaatttttacaatctaatcatctggcaaagggctaatatccagaatctacaaagaagtcaaacaaatttacaagaaaaaaacaaccctatcaaaaagtgggcaaaggatatgaacagacacttctcaaaaaaggcattgatgcagccaacagacacatgaaaaaaatgctcatcatcactggccatcagagaaatgcaaatcaaaaccacaatgagataccattgcacatagttagaatggtgaacaataaaaagtcaggaaacaacaggtgctggagaggatgtggagaaataagagcacttttacactgttgatgggattgtaaactagttcaaccattgtggaagagagtgtgcaattcctcaaggatctagaactagaaataccatttgacccagccatcccattttatcccattacagtaatatacccattactgggtatattcccaaaggattaaaaatcatgctgctataaagacagatgcacacgtatgtttattgcggcactattcacaatagcaaagacttggaaccaacccaaatgtccatcgatgatagactggattaagaaaatgtggcacatatacaccatgaaatactatgcagccataaaacaggatgagttcatgtcctttgtagggacatggatgaagctggagaccatcattctcagcaagctaacgcaaggacaaaaaaccaaataccacatgttctcactcatgggtgggaattgaacaatgagaacccttggacacaggaaggggaacatcacacactgggtcccgtagtggggtggggggaggggggagggatagtattaggagatatacctgatgttaaatgacgagttaatgggtgtagcacaccatcatggcacatgtatacatatgtaacaaacctgaacgttgtgcacatgtaccctagtatttaaagtataaaaaaaaagattaatgtttttggctctagaaccttttgtttaataggctatagaatgagatttttaaaaactaaaataccccatatgtgtacgtatgatacccatttttgtcttcttaactggagcatcggaggcacaatgtagcatttctgtgagtggttctgcaatagtgaagaatgttaaatttgctgacatttaacatcaaaggcaaatcatagggattaacagaaggcgcagagttcgaatggtggacttgacacatgccttcttttagaaagaatttgttagctttattttttgctcagcttcttctgacttctttttctgtttatgtttttaaaaaactgttaaaattatgttttaaatttttgtggctacgtagtaggtgtatgtatttatggggtacatgagatgttttgatacagacatgcagtgtgaaataaggacatcatggataatggaggatttaccgggtctgtactaccatctgggctgtgtcccattgctgtctttctggtattctggtatcttcctcagtgtgatatcagtgtctgtgacttgcgtgcattatttagacttgacatttgatttcctactcagcaacgtaatgaagacgaggtattttcctagtagcttccaaaccattgattgaatttgtggaaattaagaaaaaatacactttgacttatttttaagaagttacgtgagggccggacaccgtggctcacacctgtaatcccagcactttgggaggctgaggtgggcggatgacctgaggtcaggagtttgagaccagcctggccaacgtgttgaaaccctgtctctattaaaaatataaaaattagcccggtgtggtggcttgtgcctgtaatcccagctactcgggaggctgaggcaggagaatggcttgaacccagaagggagaggctgcagtgagccgagatcccaccattgcactccagcctgggcaggaagagcaatactcaatctcaaaaaaacagaaaaaaaaaaagttatattatatttttttaaaagtgctgttgcttagactcttaattcattttcttcatttaaagagattgatcatattgggataaagacgtgttttggaatccaaacaacctggttttaagtcccagaaccaccagttacctttgtgacctttggcaagtcatctaatttttctatttccatttcctcatcctactaatttctatcaccctgatctgttgtagtgaaaaatgatataatgcgtgttaagtgattagcaaattgactgacactaagtactcaataaataatggcagctgttgttattgctgttgtatatgcggtagtagttgtatttgttgttgattgttgccctaacagcaggccatgatttttcctaaatcctcattagggcttaactttgaactcaatttcaggccctatctatattaaaaattacctatttaatagtgtcattaggttgaatgtcatgtacagtgttgcatgatggattaatttctcataaatcacttcagtaatcatttttatgctttgaatagtaccttggtttacgtgttatatctgtgagaaaacacagcggaaatgtgtcaagaatatttccaggtactaatcctggttgttcagaaatgctcttctgttatttagtgaaagaaccgcttggttatccctctgtaatcctttatcttggaaataatcttttactgaggggtaaaaagattatagaatacaccaaaaaattcaccatccatgcattgacttagactccatgaaaaagaagtatgatacatttaaatgaactgagaatgataaaatttgcaaatgttcttgaagcatttatgcattcaagaccaataaaactgtttttgatccaggttaacagtcgtatcatactttaaggctgaatttagataaattgccaaaatccattttatcagtgatataaaactgctcagtgatagactgtgccctctcatagtgtcccagctattttttctaagagctttgtggtttgctgggctgctggtttcactacctacatgtagccacttgattacttatctcagtttgaattgcccaaatcatgcttccagaaacacacagagctcattcacctgtttccccataaaaatcatttatcatttcaatgaactttggcccccaaacacaggcattgcagagcatttcttgggatctagaatgtgcttagcattttatatgcactatctcatctaatctttccagcagccttacgtacgtatatttttatttttcttgttttatagatggggtaactgagatgcagagaggttaaatacccaagatcagacagatagtaaactggattttaaaatatatttatatattcagaagtatcaaggctattgctgtatacttcattagaaccatttctagtcagagaaattctacgagtagaaattatgactagaaattgtctccagaaatgagtgtctagagatttttctagacattgctggactaaaacagtcatttatcatccctgatttttttacctttctcctttctgctctttcaccttttttttttttttttttttttttaaaagagacggagtcttgctgttttgcccaggccggagtgcagtggcgctttctcggctcactgcaagctccgcctcccgggttcacgcctttctcctcctacctcagcctcccgagtaactgggactacaggcgccgccaccgcgcccggctaattttttgtatttttagtagagacggggtttaaccatgttagcgaagatggtctcgatctcctgacctcgtgatccgcctgcctcagcctcccaaagtgctgggattacaggtctgagccaccgcacccggcctcttccaccttttttaatgagcgatgtcttcaaggaacataggtgacaatatctaatacttcctaaatctaacaggcagtaattaagcctctgaagtctgtggataacgttgaataaatttgagtgtactcaattttgggggaaaaaaaaaaaacaaaaacagaatcgtttcatccattcactgtcatgcctctcatcgtaatcattatttgcccaatgtactgaagagaaacataaactactgtgataaagacaaaataggattgaagcataggaaaaataattagttccagttgatgatactggcatcttcattcatgaaacgattggggtctatctttcttataaatagatctataaagaacaaaaaccaactttcctagaaaatctcttcatttgatgccatgacatgtatgaagtgatctccaatcttaggtacaatgtaaaattctgtgatgataaaaacatattttggggtgctgaaacaaagcataagccactttttatatctttatttccaaattctcagattaaacatcgttttattttaaaatgtcttttattccaaggtctctatggaaaatatacaaatgtagaattcaggcaaatttcttttttcgtcggtttgcttagtctgaaattctagagccatttccaattttgttttacaaactgcagaaaaaagtttaatctcaccttagaacatatatacatatacatatcaaaataaacccatatgcacatctgaaacaaaaattgagacaataattgttagtattatataagtgacacagactactatttttctgtttaattttaaaatattcctagtcataacctactaacatgattttatgaaccatgaatggattctgacttacaatttgaaaaacaatagtctatctagacaaataattactcagatcttaaattcaaattttgattataattctgtatatatatagttgaattgatggatataaatataaaattttgcatagcttattcagatttgaatttatctttaagaaggctgtctttgaaatgtttttgttttatgcacatcctcagacaaaatatttaggttcagaatttgagtactagatgtcatgtccttgagtataagtatacaccttttaatattttcttccaaaattcaatcctgtgtaaatatcaataaatcataaagtgtttaatattttgattcaaattgcacagtgtaaagtattgtgttacttgagtattagtgctgtttacaatgcttcgtttggagaagattatttgaactcaagatagttaatgatttttaagaactcttaaatacgagctaggttaaggttcagatttcaaaaagagttaaataatgtttgctcttacacatttttgggggcgtattttcgacaataattttccatctcctgaaacctgaacagtgacttaagaaggtaatcttggggcaatttatgcttcaaaacacttcttatatatgcagaggaatttgataataattacagccgtaacatactttatttagttgttatacaaggtcactctgtgaagtgcattatgcactctttaattcttaccacaatcttattatggaagtattattgttcccattttacagaagcagaaactaaggcttatgcagggctaggtaactcccaaagtcacaagattccctttctttctatatcatcaatttcagcataagtggttggttcatataggaacataacaggagtaggaaaggatatgatagggtttcttggtcgtttgtattttcttgaaaaaattgccttcttgctgcatttgaagcagggtctggttcagataggaagcattatctcccagggctgccagcaaccttgtttactcagttatagacataacacacttacgccatattctttgaatcttactaaacttactgtgagctcaccagacttctgtgcttctagggcattgaaaatgctatatgcaaataggacagatacacatattataccacctgtctcctctgcgcatgtgcatccttcattgcacataggacttcacttctaaaacacaaattcaaaaataaaattatttacaatttcaggatagtatcagcagataatagaggcatgtgtttcttctgcgctcagggccctgtgcaactgctcaggttgcacaaacgtgaagctggttccacctgcgcacatctctcaggctgcctttatatcattttcccccttaatgctgactttgatagttattattaatagtatttagagacggaagagatacaccatggaagttgttctaacccctaagaccttcagaaattgccttactgttagacaagggttccatgcaaatagccctttcagtgcacttaccctctttgatatgatgaagttcggtgattttgacttaccaggatgacctttctctgccacttttatagaaactggaaaaagagtgcatcatttgatgaaaatgtcattgcaataactgccactatgccttgtcatctcgaaggacttaacagttggggaaatttaaaatattgaattttcaaaatttgagcatttatcagaagagcacaagtaagttggtgctggcagcttagtgggttaattcccagaactgagaaggacaggaaatgtagcacatacacaccaggggaaagccaccaaaggttgaattttctctgggtgagattatgaaatcccccaaacagcttctgttgttctacactgctttttgattcctttacaaaaccctgtttgttagggggccccgtgcttgcttgcaatatttgtggaatgcagaagattcttctacaaatatttctccaatatttgtttgttctgctcacctccgtaaatagtatgcctatgtccttgacctcagcaaagtccctcttgagcatgttctcaggatttttgaagcccggcgacctgcaaggagtacactcctcccaaagcaaaacctcctgcaaacttagtagtttactcaaatttttgcccttgataaatgcctttaggttaaagcagcagacatgtagtttatcccaagaagcctctcctgtcacttgagtgtatggttcctatagcatgcaaatctctgcaaacatatggccaggtttacagctcatgtaaactaccccgtctctattacttggcttcagatggggagaagttagagccacgcagagcgctccagcctctccagaggaagcctttctcaccagatttttctaatcgacctccttgcttgctcttacacacctttaagctagatattggattaagggttgtgagaccaattttgtgatcacttcttagcaattttttaacaggtaccctggatcttctctttagaattatggatgcttcgtacactttgctcttggctttagggtccagacggaaattccaagacaaccatttgcattctcacttaatatcctgctaattaaattgggtaaagcatacttcatattttagttcttctaagataatgtcttactatttaaatcgtggccttctggaaataaaggctaaatcacagaagtcattatgctgttagaaattttagatgggtgggtgaggtattttttttctttctaaattttgccttcctttcccctacctccttgttttcttactgatgcctttactggtctgtaaatatttggaaatatttcattacctagggcctctcaggaagagatatttcctttaatgccattgcagaggtatgtaaatataattctgataatgtatatgtaagttattataaataagaaatgaggaaagttcctacagatcaatatttatagcatttaaaaagcaacatgaggtgatatactaatttactccttccagtaatctagaagagctttaatacaatattaatttggtgtggattttgaccgctatttgaaaattgatgtatgcatgaggaagttaaaatgaaaactccctattgtctgtatctgctgttcctgtgtttgataatgccagtggacagtcctagcattttaaatatttcattcgattcatcatttaatgtactggaacaatctgcaaagacattaattgtgtaacacccaatttattttattgtgcagcatttggaagctcctgaagacaagtcatttggcagttcattgatggagagtgaagtaaacctggaccgttatcaaacagctttagaagaagtattatcgtggcttctttctgctgaggacacattgcaagcacaaggagagatttctaatgatgtggaagtggtgaaagaccagtttcatactcatgaggtaaactaaaacgttaatttacaaaacaaaacatatgacttgttataatggcaagtcatcctttttcctcaattactctcttacatccttgtattttggaaatttagttactatgatgtgcttgggattccaacagtcagattttgaagttttcttttggagagcaaccattgaaggcatttctacctgatcggccaacaggaatacgaaagcccaacttctttctcttgtgtcaaggcagtgctgaggcattacttacattcctgagttgatgtatggtattgggcttaacttctctcagtgggagacttttcctgagatgatacactcgtttggcttctttcccttccctgtcctttttcctccatcttcaactcccttgcggaacttcctgggagctcttccttaataaatcacttgcactgaagtccttatctcggggcctgcttctgaagaacttgacttaagataattttccttaattcatattaaaagtggttttgggattctgcaaatacaaattaaattccttttactgggaatataaatctaaatgggccacaagtttaaaactgcaaacaaataaaactcaaaaccacaccgatttacctagagttctaattacaattgttaacttccttctttgtcaggggtacatgatggatttgacagcccatcagggccgggttggtaatattctacaattgggaagtaagctgattggaacaggaaaattatcagaagatgaagaaactgaagtacaagagcagatgaatctcctaaattcaagatgggaatgcctcagggtagctagcatggaaaaacaaagcaagtaagtccttatttgtttttaattaagaagactaacaagttttggaagcttgtgattattttgatgtggtttgatggttaagttacgattctcagtttgttcccaaggcacacagctttctttcaagggagactggttggattttcatagaaataacattttggttttcacttttgtaactaaaagagcagatgttagatagatgcactgttatctacagaactatgttttaagatttgccaaaattctgtcatagttattattttctaggttttcctccaaacattaaaatgtcactataaaaggcacagaagcatgcacaggagattgtgtacataaaatcacctattagctatagttgacacgaaacttctcttctgaagaaaaagcccttgaaaatattaaagagttactcatctatatatggaaatcctcttgaaaaacattattcaaacgttttgggaaattcttattaaaatacagtatggctatgaattatcttaagaatatatattgacttaataaaaaagaggatttgagacatttctgaaaaatgacatatttcttataaaggtaacaagcagatctcatcattctggatatgtgttttgatttatattgttaggtgtgtatattcatgtaaagcctatcaagacaagatagatttatttttaaatgaaaagaaatgaagtgccaactgtggatttgaatacattaagtgaaaaaaattgtccaaatgccttaagtttatttaactattatttatgaagttcaaaagcgttaaaaaaaaaaaaggaccaaggaaactcattagatatgctagaaggattggtattccagtactaaattatagtgtgaaattatggaggggaaaaacacatttttaagctcaggccttttgaaagaataaataaggtacatgtaagatagaggtttcataactatatatgtattccaagccaggagatactaatctatgcatattgatattattcgcctgctgtgatcgtggtgatgattgtcactacccctagatgtgagaggtacaataatcatattataactgttgagtctgcccactccccagtgtttaccaggtccactaatttactccatctattatcgatattaagatataagctgccttctgtggtcatatgccaacattcttcaggttagaacttctatttgcagtgatctgtggaacttaaagcaacctcaaacaaaattagaaagttttgaaaatccaaccacctctttactgtccttgccataatagccaccagtgtcttctcctttgtgcactctaggtttccatcctctcctggaggctaaatgctctcatttttcttacactccccattttcaataaaactaacaatatggcattaattattcatactaatcagttaattaattgctgtgtgaaattgagttgcaagaaaatatgaattcctcctggaattaaaattgcaactttttctttgcttatctgaaacataaaaaaagtcttttatctgtgattctaacatttaaaaagatgttcattcaaaaattccccccttcaagggatgtctgccattaagtgaaggatgacagacacctagacttctgtgcgtgtaatttcctcatccccatcccactagagaatggaaatgctaaaatggcagtattaccacctagctgagattgacataaaaaattagtttgtccttagggaagattcaagagcttttgtacgtgttacagcttttagaataattattaagaaggcaaggagagccttctagctggtatagcttttgctaaaacatctcacagagtttttaaaatgagacacgtacatgtaaccacttctatcacatagacttttctggaaaattccttaaaaatgaatatacaaagcattatttgagcaacacaaattcagaaataatatgagagtttataaataacagtcttccttgccactttgactatgtatgtgttcgtgcataaaacctattaaattctaatgtgataagccattatgtaagctttgctgaacctgatttttgaaagattttgtgagaggaaacaaaaaacgtgattatgaaaagagggtattgtcattatttttaaaaaactaatctaggttttacttaatgcttcaaataaattataacctgttcagtttccattatcatggtcatgagaatggattatctccaatgattagcttcaacttggagcattacctattttttttctaaatatatgattacttcagagtagaagattactagtaaacaaaaatggattcatcgatacttcttttctctctctacctaagacagggtttggatagatccagtcggaagccattatttcctgcctaagccttggtttagcgattagagaaatgataattaacatttgtctagtcatattaagtatatccaaagctatgctataatttctaagttgatataacaaaagttaaaaacttcttgtaaatacagataagcttatcactaaaatctatgaacatttacacttagcaattattaatcctatctaccaacatacttactattaggttgctgcaaaagtaatcatgtttttttccattgtaagtaatgggaaaaactgtaattacttttgtaccaacctaatagcaacatcaaattatatttgatatatagtcattgtgagatatatatatatatatatatatatatatacgtataaaatacacatatatctctctatatgaacaaatattaatggaatacattatcaaaaacaattaatggcactggagactcaataatgatcatacaaggtctggccccagatctcatgaaacatattctgtagaggctggcagccaagaaaaaaaagaacacaagaaaaataccggataggaatatagtttttgaagagattaaaatgtaatgtgatagagaatggttgaggggaggctactttagactttgtgatccaggtaagactttgaaggttggtaccatttagtttgagatttgaatgacaagaaggtaccactatttgcagatcacaaggaagtgtggttcacggattaggaacagctaatgcaaaggcccaaaaatagggacagtttggcttgctggaggaaccaaaaggccagggggactgtagagttgcagggtggtaagttagatggctgaggtctgagatggggttgaaatataggtaggagactgattacatattgtagtgtcagtcagggctttgaataagggctttgaattctagactaagtgcaagacaaagccatcagattttatgtaggtgagagataggtcaagaaaacctatcaggaaggccactggaggaagagaggacagttattaggccagtgaagttggccagttaagacacagtagtgtcttagaccagctggtagttgtgataaaagtatactttactatcttagccatttagttattttaaaaaccacttctctgtttagttttagttcctatttttttttccttttgacagtaaaagtgctttttcctttggaaatagactgcttcaatttgtgcccacagttactattattcaagttgcatctaggaaataatatttatcccataaaccatcaacaattatgcaaaacaagaaatattaaaaatacaaagataatagcgtgccctgatttctgccttacataaaatcctctccagtttgcctaaggaataagggcttgctttctcaaacacttatttatgtgaactggggcaatatacttttcttttctgttctctactttatagttttgtaaaacagcaatagtgtcatgaggctgacatacctctgaaagatactagatgagatagggtataaaaagttagtttgtgaatgcaaaattattataaaatgtgaagaaagataactgtgataaataagatgatgagctgtcagttaactattttaccataccatgtcactttttatatgtaatttgatattttctatatgaagtattatataattttatatataattatatttcatatattttgtataataacttatatataattttttaacttttaaaaaaattttgcagggaatgaggtcttgttatgtttcccaggctagtctcaagctcctggcctcaagtgatcctctcccaccttggcctcccaaagtactagtattacagacctgagctaccaaacctgaccctcatagatgttttttactttttttctccagccttttctaattgcctcagtcatttttttttcccaaagagtatagctgtggttattttgtatggggataagggagcatgagcaggatgattagaaatacatttgcagttattttttcacaatggcaacatttaaaaatatgcttacaaaggaatgtcaggaaagataaccatacagatacttcctcctttctttctccttcataaccacactctcatttgattctttccttgctattgtattttccctccaattctgttgcttttatggacataaatttctgatgaggtaaaagctaatacaataaagaagtttattaacacatctccagtcacaaatgagtttggcacgtgccgatactggtcaattacaaaactttaccaatgtttatatgatttaaatgagaaaactaagtgccattcctttcataatgtagtgtttaaaacaagagaatattgatgtggttttgttagaaccccttaagaggagtaagccaatgattttttttttaatgctgtggaatacacttgggatggtaggaggtaaggaattcggaagaaaaacacacaacttccaactgtggaagtgcaagaagacaactggcacagggaaaacagaagattttcttctctatgaataaactaattaatttgattgaaaaatgcaacctgcagagagcaaaaaagatttactgacatttttataaggactcaaagttaagcacagcaagttccatcaacttttctgataattgtagttaggacatgcaggcagaaactaaaacttctgtgacggtaagggaaaaaaatgaaagcaagtcaggaggccaagtgaagttgtgttttttggtttatatcagcaggaggagagatatgaatagtatctgggtagatacacaagccataatatggaaaataattgtgaatcaccatcaatgctttgactggacagaaaaatacatctaacaaatatggctcatctctttttttttcccccaagtgtctatttgactctggaaataagatggcatatgtgagagtggatagagaaaaggaggtgctgaacaaatgagtgggttattttctcccaagtgcagtgaagtttgcgtatgtgaatatatgaatgaatagatgaacaactaaattaagttattcaggtaattccaatcttggaattgaattcgttgcagtaaatactttggaggtgcacaatctcaaactcctaattgtgattttatttcacaatttggtaagttcattgatttttctgttttacttcttccagtaatgttaagcaatagtaacttgcagatcaaggtggtgtaggaccagtagcatcagcgtcacctgagaacttgttaaaaatgcagactctcagctctcattctgatatatacagaatcagaattgtgcagtttagcaatatcccaggtgatccctgatcagtttaagtttgagaagcactgatctaactgaaattaagacagagtagaaatctcaacttctttgtaaacctctacttagatatcttctgttcctatttttctatcaagtgacgtgggccaaatattttaattactttctcaggagctctaaaaatggtgctgatatttcattcagtcctcatatgttgatatcataccccatgggtgattaagcagtagcaagattctggtgcaataatatataacagacaatatatgagtgttgatgagtattgataattaagctattggactaataagaagtaggaattatttatagatgataacgtgacattcggttaggttgcacatggattatggtcataataatttttctgtcaataattaaaaatgtgataatgcagctaaatgtggacatctcttgtactaataatacaatgcatgtgactcatagtttaaattacaggaaagctaaatttctggaattcacagaaatgagagagccgtatcttcaaaaacaatgctttctcacaaagataaataatgctgatatggtttggctcatcttgaattgtagttctcataatccccatgtgttgtgggagggacctggtggaaggtaattgaatcatgggagtgtaaccctcatgctgttctcatgatagtgagtgagttctcacaagatctgatggttttataaggggcctttccccttttgcttggcccttcttcctgctgccatgtgaagaaggacatgtttgcttccccttccatcatgattttttctgaggcctccccagccatgccgaactgtgagtcaattaaacttgttttctttataaattatccagtctctattatgtctttaattagcagcgtgagaacagactagtacagtacattggtaccgcagagagtggggtgctgctataaagatacccgaacacgtggaagtgactttggaactgggtaacagccaggggttggaacaattcaaattaaactaatagactatctcagagagcagatttaatagaagttgacattttaatcttagtacaaaaattcccaatcagaaatatcaaaactatgtcttgttcataattaagttatactacttatacattgaagaaatatttattgagtgtgtagtatgtgccaggcactgtgccagatgctatgtagtggcaaaatttttgaagttgagagtgagcttctatttccacataaatgaatagaatttcagagtgtcaacattacctattcttactagagataatttaaacagtcttccaaacgtgatatattcatatttgtccttggctcctgatgacatctgccaatttctttattttctttaaaagcatttaatcaggaagattgatttgagggttgccataatgtatttgccacaagaatctttttctttttctttttcttttttttttgagacagagtctccctgtctcccaggctggagtgcagtggcgctatctcggctcactgcaagctccgccccccgggttcacgccattctcctggttcagcctccccagtagttgggactacaggtgcccgccaccacgctcggctaactttttgtatttttagtagagacggggtttcaccatgttattcaggatggtctcgacctcctgacctcgtgatccacctgccttagcctcctcagcctcagtgctgggattacaggcatgagccaccacgcctggccaagaatcttttgcatccagccacgcagcttctttatgttattgttactaaactgaatttatgttttcaaaatgaaaataaatgtgtttgcatttgaactttaatgttgcctcggatagttgaaaaatattaataattaaactgttcagctatatggatggaggacaaaaatggatcaggatttgaaaacaatgacacattttcgattttctcatagaattcagtataaaaacaatactatttctcacattccattaagtaggaaaataaatgttagtgcatgtttaattttgtgaaaaactggaacattttccttcatttctagttgttggatggggaactttatattaggttctttctgaactatttactgtgaggttgtaatttaaagtttgacctccaagatcaggttgcagggtgcagtataataactatggcaattagtgggaatttttgaaaatgatacatgacatgctctccttggcttctttcctagcccaagatgtcagcatacttcgtgttgggaaagaaggtgctgtaaagaggagaatgaacacattagttttagggggataaaaactgtataattttgtcagaccttgcctcacttcattctccaatggaaactactatattagtgcctaagatttatacacaccgtgacaccatgcagtgtcaggctttgcagctgagtctagtaaggaataccagaatttggaggaaagcagatctagttactgaggcaagtaggtaaactaggccagtagggtttctacagcttcacagatgctgagggtacccattcagaaagttagcatgagaactagaggacaatagcgatggatgtacttgtggtaaaggtgatgagatagtgaaaacagtgacagctgaagtcttacacatttgagggggtaattggttctgtttggattctggctttaaagcttatatttcacaggccacttattgaactttgataaacgttataaatcttgggagttgaaaaatactaatatgcttcctatggaccattcattattgccatgcaacaacaacaaaaaactatgtgcatatgtttgtacatgcactactcaagcttttcttttaaatgaatgttgcttttctatattaaaacatgtttgccatttcttggattataatatatcatgatttctgattcctatatttaatgatacaccatacattttaaaaatatctagtcattttatatggtcaccatatatttgagggaaaatgagtctcgaagtttattgtggaggaggtggagaaaaatcgccaaacagaagcctccagtaattatccctgttgcaggaacatcaaattgaacaactgtccacactagaaaagcaccttcataagagtgaaaaattaggtgcatgatcgtagtacctggtttttgggttgtatcacagaaagaggcacagaagagggtagtaaaggcaatattctatcacctataccagctctccctcatccatggcagcagtcacatggcatgaagagagagtctatgtgcttgcagaagggagattgcagtgattataggactttgcattgaaaatcagtgctgccctgtcacagtggaaaccgacaaagaacagaactcagccaaatcccgcagagggagcatttagatgaaccctagacagggaagaatcatccatcccagtgtttggaacctgagttccggcaagccttgtcatcatggattagagtgctctgtggttctaaataaacttcaaaggtagtctaggccacaaggactgcagttcctttgcaagtcctggtgctgtgccgggctcagagtcagtggacttgggatacatacaacctagtgagacatccgctggggcagctaagggactgcttgtgcttcccttcccccaaccccaggcagcacagctcacagctccaggaaagactccttccttccgcttatgaagaagagaggagacaagaaagagaactttgtcttgctgcttggataccagctcagacatacaataggatagggcaccaggcagagtcttgaggtccccattccaggccctagctcacagataacatttctgaacacaccctgggccagaagagagcctgtcaccttgaagagaaggaccccgtcctggcagaattcatgacatgctgaccaaagggacctagggccctgaataatcagcagctgtagccaggcagtacttgctgtgggtattgggtgagactcagagctgtgatggtttcaggtgtgacccagtacattcccagctgtggtggctacagggagagaatccttctgcttcaggaaaggagaggtgagagtaaaggggactttggcttgcagcttgggttccagtttgaccacagtggggcagagcatcaagtgggctcctagggtccctgattccagagtttggctcctggattccattttcttactgccctgaagggagagactcaggactgacagcattcaccacaggctggccaaagtggccttggcccttgagtgaacattggacctcagacagtactctctttggttcagtagtcgtcgtggccatgaggagagacatctctgtttgtggaaaggggagagaagagagggaaggactttatcttttgggtggggtgccagcttagccacagtagaatagagcaccaggtagatttcttaggttcttgagttgatatagtttggacatgtgtgcctgctcaaatctcacgttgaattgtagtaatctgcagtgtttgaggtagggcctagtgggagctcattggatcatgggggcaaatttttcataattggttgctactgtccttgcaatagtgagtaaattcttgcaagatctggttgtttaaaagcgtggcaccctccctctcactcttgctcctgctgtggccatgtgatgtacctgttcctccttcaccttctgccataattgtaagtttcctgaggcctccccagcagctgagcagatgccagcatcatatttcctgtacagcctgtagaactgtgagccaattaagcgtcttttctttataaattactcagtctcaggtatttcttgatagcaatgcgagagtggcctagtacagaaaattgttaccaagaagtggggctttgctgtcaagatacttgaaaatgtagaagctgctttgaaattgggtaacagacagaagttggatgagtttggagggctcagaagaagacagatgagggaaaatttggaatgtcttagagactggttaaatgattgttaccaaagtgctgatactgatatgcacagtgaagtccaagctgtcgaggtctcagatggaaagaatgaacttattggcaactggagtaaatgacatgtttgttatcccttagcaaagaagttggctgtattatgtccatgctctagatatctgtgaaagtttgaacttgagagtgatgatctcgtgtgtctgacggaatgaatttctaagcagcaaaatgttcaagacgttgtgtggccacttctaacaacctactctctgatgcaggagcaaagaaataagatggaatatttattattttattttattgtactttaagttctgagatacatgtgcagaacgtgcaggttttttacatatttatacatgtatatttaaaaggaaagcagaccataaaggttttcaaaatttgcaacatggatatgtggtagaaaataaaagcccattttcaggagaactcaagaaggcttctgagcaaccacttgctagaaaaatttgtatacctacaaagaaggcaagtgctgatagccaagacaatggggaaaaaggcctggaaggcatttcagagatctaaaaggcagcccctcccattatagatccggaggcctaagaggacagaatggtttcctgggccaggcccagggtcccagctgccctgttcaacctcgtacactgtgcccccgccccaacccctcccccccgcacccagcgtcctggccactgtagctccagctgtggctcagagtggcccaagtacagcttgggccacagctccagcgggtacaagccataagcctgcaggtgcacagagtgcaagagttgaggcttgggaacatccatctagattttagaggttgtatggaaaagcctgggtttccaggcagaagcctgctccaggggcagaaccctcacagagaacttctcctggggcaatgcagagggaaaatgtgggctttgatcccccacacgtagtccccactggggcattgcctagtggacctgtaagaagagggccactgtcctccagactccagaatggtagatccactgacagcttgacccttgtatctggaaatgaaacacacactcagcaccagaccataagagcagctttggaagctgaaccctagaaagccacaaagttggagtctgcccaaggccttgggagcacaccactcccaccagtttaccctggatgtaggacatggagtcaaagcagataattttggagttttaagatttaatgactaccctgctgggtttcagacttgcatgagacctttcttttgaccaatttcacccttttggaataggagtgttgactcaatgcttataatcccattgtatcttggaagtaactaattggtttttgattttacgggctcataggtagaagaaacttaccttgtctcagatgagactccggacttttgagttaattctggaataagtaaagaccttgggggactgtttggaagacatgattgtatgtttaaatgtgagaaggacttgagatttgggaggggccaggatggaatagtatggtttggatgtatgttcttgcccagatctcacattgaattacaatcctcactgtcagaggtggggcctgggtgggagccgaatgaatcatggcgttgaatttctcatgaatggtttagcactatcctcttagtgctgttttcatgatagtgggtgaattcttgtcagatccagttggttaaaagtgtgtggtaccctcccactcacctcttccctggccgtgtgacatgactgctcctccttcgcaatttgccatgattgtaaatctcctgaggcctccgcagaagcagagcagatgccagcatcatgtctcagggacaacctgcagaaccatgagccatttaagcctcttttcttcataaattacccagtatcagatatttctttatagcattgtgagaatggcctaatacatgaccccaggccctggcttacatataggatcttgcaaacccaccagggaaaaattgctaccctgaagtgaaaaacacaagcttcattggatttgccacctgccgattgtagagtccttgggccctgagtgaatgtaggtgatagccagtcagtggtcagtgtgggccttgatcaagacccagtgttgtactggctttaggagtgacccaacacaatcctagtcgtggtagctacaggggtgcttgtgtcacctctcctttagctccaggcagctcatcacagagagagactctctttgttgaggggaaggaaagagaaaaagattatctaccaggtaatacaggggattttcctgaatcttcccaaagatcaccaaggcagtacgtttaacagtctgcaagagtcacagcattactgggcttgggtgcaccccagtgcatatatggctgcagtgaccaaaggaataaatcacaacacccaagaacctttaaatacctggaaagccctcctgagaagtatggatacaaacaagccgatactgcaaagactacaataaataccaaagtcttcaatgcccagacattgatgaacatccggaagcatcaagaccatccaagaaaacatgatctcaccaactgaactaaataaggcatcgctgaccaatcttggagagacagatatgtgacctttcagacagagaattccaaatggctgatttgaggatgctcaataaaatccaagatagtacagagaaggaattcagaatcctacacataaatttaacaaagggattgaaataaaaagaatcgaacaaaaattctggagttgaaagatttaactgacatactgaagaatgcgtcagagacgagtaacagaagaattgatcaagcaggagaaagaattagcttgaagacaagctatttgtaaatacagtcagaggagacaaaaaagtcctaaaaagtttattgaagagggtaataacacagaacttcccccacctagagagagagattaaaattcaagtacaagaagataatagaacaccaaggagatataatataaataagactacctcagggcatttaaaaatcaaacttccaaaggtcaaggataaagaaaagatcttaaaagcggtaatcatataaaaaaaaaaatcacatagaaatagctccagtatgtctggcagcacaattttcagtggaaaacttccaggccaggagagtggcatgatacatttaaagtgctgaaggaaaagacttttattctagaatagtatatctatgaaaatcctcttcatacttgaaggagaaatgaagactttctaagacaaagaaaagctgacagatttcattaacaccaaaccttttctacaagaaatggtaaagggcgttcttcaatcttaaagaaaaggatgttaatgagcaatgagtcatcatctgaagtaacaaaactcactggtgatagtaaggtttgttactattctgttacaaagagaatattataacactgtgattatgatgtctcaactacccatatcttgagtaaaaagactaaaagacgaacctatcaaaaataactgcaacaacttttcaagacatagacactataataagatataaatagaaacaacaaaaagagtggggggatgaagttaaagtgtagcattttttttttttttagttttctctttgcttatttgtttatgcaaccagtgttgtcatgaatttcaaataatggattataacttattctttacaaacctcatagttaccacaaatcaaataatgtactcaggtacataaaaattaataagaatgtataacatatgaccagagaaaattactttcattaatagtaagacaggaaggaaagagagaatgaagagaaggccacaaaacaaccagaaaggaaatagcaaaatgggaagtgtttaagtccttaacgtaccaatgataacatggaatgtaaattgactaaactatccaatctaaatacattgagtgacagaatggataaaagaatatacaagacacaataatctgttacttacaagaaacacacttgaccaataaagataaagatagactgaaaataaagggatggaacaagtattccatgccaatcgaaaccaaaaaagaacaggattagctattcttttatcagacaaaataggtttcaagacaaaaactataaaaagggacaacgccggtcattgtagaatgataaaggggtcaattcagcaagaggacataacaattgtaaataaatatgtacccaacattggaacacccagacgtataaatcaaatattattagagttagagagatagaccccaaaacagtaatagccggtgatttcaattccccattttcagcagtggccagatagatcatccagacataaaatcaacaaagaaacatcagacttattatgcagtgtagaccaatttgaactaatagatatttacagaacattttatccaacagctgcagagtacatattcttcttctcagcacatggataattttcaaggacaagccatatgttctgccacgaaacaagtcttagaaaattcaaaaatcaaaataacataaattagcttttctgatcacaactgaatatatcaagatatcagtaggaagaattttggaaactatagagacacatggaaattaaacaatatgctcttgaattatcagtgggtcaaagaagaagttaagaaggaaactatagaatttcttgaaacgaatgaaaaaggaaacgcaatgtaaccaaaacctatgggaagcagtgaaagcagtactatgaggaaagtttataggtataaatacctacatcaaaaaagcagaagaactttcaaataattgaatgatacaccttaaagagctagaaaagaaggagcaaaccaaacccaaaattagtatgagaaaataaatattacagtaaggaacagagctgaaatacattaaagtacaacaaaatgatacaaaagatcaacaaaacaaaaagaaggtttttttgaaagggttgacaaaaatgacaagtcttaagcttgactaagaaagaatgagatccagtcacttacaacaacatggatggaactggaggacgttatgttgattaaaataagcccggcacagaaaaacaaactttgcatgttctcacttacttgtgagagcttaaaaaaaaaaaaaaaaaaaaaaaaaaaaaaaaaaaaattaaaacaactgaactcatggagatagagactagaatgatggttaccagaggatgggaatgctagtgggtcgggggcagtggggatcattaatgggtacaaaaatatagttagattgaatgaatgtgatgtagtatttgatagcacgacaggatgattactgtcaaacataatttgttgtacgttttaaaataacaaaaagtataattggaatgtttgtcacataaagaaatgataagtgctcgaggtgatggataccctattaaccctaatgtcatattatgcctgtatgcctgtatgaatatgtctcttgtatcccataaatataaacacatactatatacccaaaaaaataaaaatttaaaaaatagggtattgtggtttctatcattaaagtaaacatcatgctaagaacaattgtctcaagagtaacaactgtaattttcgttttggtgaaaataataaaattattaatgacaatctctgtataaaattccaccaaatgaacttctgttttctatttttttaatatttataatcagtgccataaatgactttataatagatataaagttaatctctaaaaagttaattttagttcaggcaatattgcatgattgtgaagcaggccccggagccaaactacctgagttcccactttgtcaccttcccttgtttgcgttttgacccaagtaagcctttgtttccccacctgtaaattggggctaatatcagttgctgaatcaataggattaattacaataatacctctttttttctgacacacaattattattttgtatttaaaaattatatttaaaagccccaaattctacaagatcaaaattactctttagtaagtcttcttttttatttgtaatttctgggggtacataatagatattttagtacttgtggaagtcatttataaataagtaaacgcatgtttgtgcatcctgatcctttgtctccatgttacctctgtgcatctggttcatgttaaccctaacaagtcatgttgtctggatacagctttccaggtatttgccacttgtgaggacccaagggctaaagtaaaaattatggctgtgtcctggggcgggggggggggcggggaagaggcacaatcgttctcaaccctggatgttcattcgaattacctggttggatagttttttacagaaccaatacctgggctccattcccagatattctgattgaattgttggggaatggggctgggacgtcattttgaaaagttctctcagtgattctaatcaattagtacctttttatattaaggcattatttatataaattccactaattcacctatctgtgatagtttgaataaaagccggacttaaacattacctcaattaataactttctgttttttaacctatcttggatttcttttcttttttctctccctcttttattattattattatactttaatttctaggatgcatgtgcacaactcgcaggtttgatacataggtatacatgtgccatgttggtttgctgcacccatcagctcatttacattaggtatttctcctaatgctattccttccccagcccccaatacctttcttaatagagaatgaaacaaaagctgaaacaaagttgattttaaaaattacttatttaagcagatgacagcattctagaagcatctagttgcatataaagaattgttaagctaaaaccaaaactaatctatctataagaaccaccttgctagaatttttgagccatcgttttgttatttttatctatttttttaagacggagttttgttctttcacccaggctggagtgaagtggtgtgatctcagctcactgcaacctctgtccccccgggttcaagtgattctcctgcctcagcctcctgagtagccgggattaaaaagtgcttgccaccacgcccagctaatttttgtatttttagtagagatggggtttctattggccaggctggtcttgaactcctgacctcaggtgatccagccacctcggcctcccaaaatgctgggattacaggcctgagccactgtgcccagcctgagccatcattttgaataagtaaataaatcaattccaattttcatcagtacaattttagtttctaaatggcgtgcatttaaaagtaaaaacatgcattaaaaattaagtttctctaatttgtactggtatctttcccttaaatcatattatacaggttttatttctgacttaaatcatgtaattgtattttacatgtaagacatgtcaattgaacatcactggtagttcttttctaatctagactttcattataatacattacctccttttattaggtgtatttttttaaattgaggattgcatatatgccagtaactgtgaattctagggaattgggcctgagagcctgtcttcctaaagagctcacacctcttggtaatttgtaagttttaattgtagtcctctaggttttataaagtctatccatttatgcctttattagttagtgcctagcatatgattatgttttcataatatatgtttatacattttataatgtatttccataaagcacaaaaaatgctattaggaccatcaaatacaggctgaaattaatgaaaacatgtactattttgcatttataaatttgtatatggaaaatgaaaattttaaaaaatgctattaatgtttattgctagattgctaaacttaggatgtcattcctcatagacattggaggacaaaataaattggtatggataagtacttgcaaataaggattcacggatattggtaatctaattatctgtcggtttatagctgtgctgtccaatattgcagccgctagctatgtgtaggtaaattataattattataattaaatatagttaaaaattcagtttctgagccttactagccatacatatttcaagtgttcattattcccacctgactagtgtccattatatatgtatacctatagtgcacacatagaatatttacatcattttagtaagttctggacaacactggttaaagaataattgccttcctacattctttcttttttgttttttgaaacggcgtttcactctgtcactcaggctggagtctaatggtgcgaactcagctcactgcaacctccgcctcccgggttcaagcaattgtcctgcctcagcctcctgagtagctgggactacaggcatgtgccaccactcccggctaatttttgtatttttagtggagatggggtttcaccatgttggccaggatgctttcgaactcctgaccttgtgatccgccgcctcagcctcccaaagtgatgagattacaggcgtgagccatcgcacccagccgccttcctacattctaacagagtttctgtaaagcaaagctggcattcccattgaattcctttatgttcatacagatacgttttcatgtccgggggtgggatgacagctctcgagtaaaatcatttgaaaaatactacgtcttagaatgccatttactgcaaatgacaaaaaggccaactcaaagtgacttataccattgctccttaaaatgtgattaatggatccgaagcattgatatcccttgggcagttgttagaaatgcagaatctcaggccccaacccaggcctactgacttagaatgcatagtttgacactctccaggtgattcatatgtacattaaagtttgagaaacactgggcacaatcataaggatgtctgttatctaacaatatatcaaaaatgtcgttgacgctagagaccattaggtctgtaactctatgttgccaaagttccaagttcttacaacttatctgttttgctagcccctctctattctcagatgatctgaacgattggaagtttaccgtagcagttcctagtatcatgtcctgatatgcttttgcctatacctactgtcaggaccaactcctgccctatactactttattctaattccactccctcggctctctattgccagtcatatatgtatactccattcaccttttgcttttactttcccgtctaaatgacgacttgaaggatataaaatgaaacctggaaaaatgcaaacattttttcctatctgtgcatggtagatttttattttgtgactttgacaatttttccaaatttatttacatctttagaatgttagctggaaataagaaactcctgtctcattttcatcatgttttaaattgaactatatgaagccattttcatcaacaaagaaattgaaatatcagaaatttcatatgatctaatacaatattttgcccatgaaaaaaataaaatagtgcacagtcttgggtcacacagggtttgtgatttctatactggcttcacatgccactgtgccagctctttaacctaccactatcctcagaaataaaataacagtagctaggtgcggtggctcacgcctgtaatcccagaactttgggaggtcgaggcaggaggatagctggagaccaggagttcaagactagcctgggcaacatagggagaccacatctatacaaaaagagttaaaaatttgccagggaaggtggtgcacctgtagtctcagctactcaggaggctgaggcaggaggatcatttgggcctgggaggtcaaggcttcagtgagttatgattgtgtcactgtactcgagcctgggtaacagaatgagaccctgtctcaaaaaaaaaaaaaaaaatactagtattataaatctttaccttggcaaggttatgttaaaaaaagttgaataaatgttagccagtgtattttacaactaatattaatgacattttaacccagaggttaacctccccactccctgaagtcacccctttatttaaaccatctttgggaaaaaggacatttgtgtcatgaaggctgttaaactcaccttctgatatcagtgcctccttcaattttgcttcttcctctggttcagccttgcaatggaccactactcacttccttgctaatcacccagaaaactctggcctataattcacctgcactttactgatgctcttttcacaggcctcagtgaaggaaggaagcgtcctcttcattactagttatttcaatctttagagtttttcacatatcagtactgtaataaagcccttccttactttactgaagggcatacttgggcattctgagtctgataccctttgatacttccctgccagtgtcacataaatctatatcttctgagttttagcagtagtaactaatagatcgaacacataccttaagtagactagcagtggttttcaaataaataatattcttacctggaatgttgtcattcaaagtgtgatccatgacccagcaacattggtttcacctggaagctggttagaactgaattcttcgacccaaccccgtgaatttaaatcagaatcaccaggtgggctgtatccatatttaagtttgagaagctgtgatcaagaccccggggggcaccaaatccaaatgcctattgtagaagccagaaacataacataaggaagtgagatgagttgcgtataaaaaaggatagggagtgatgaggactacagcaaactggagagcttatactttgtatatgaagtataattggatgcgaagtataattggatgtgaagtataattgatactcaattttgtcctataggaaggaaggtttagggttgctgaatcctattaaatatgatcaagagtggtcagatttgatatttgtagctaatatctcaaattttaactactggcaaaaatttcaatttattttcaattagtatgagaccaaatccagcatatggactactatttgctaatatctagtcaaggcctgtagtaaggaaaagaaatattttctcaattaaaacatctcagaatcctttccaacaatgggatgaatgctttttgttttcgtgcttattagtatcacacctccacaatccttaggttcttctgttttcaaacttgttctgaggttaatttcatgcttcagacacatgaaatcctgctttttggagcctcaggtagaacccattctttggcagttggcagtcacacttctctctgtaagtggaggtgaagtcaggaagagaatgtaaaagtctcatgtcaaaataattcatagtaatctcctggggattggcagttgtcctcctattaatgttaatatcttggtctctgcagaatttgggtgagttgtgtttgtagaataaagttacctagagcagtaattttcaagtgtgagtatgcatcagtcacctggaagtcctgttaaaatacacatttctagacctcatcccagagtttctgattcagtaagtgtgagtcttgcacacacttctagcaagttttgaatttgcacttctagcaagtttctaggggatgggctgatgctgttggtccagggtccagtaaccacactttcagaaccactaatgaagagagaaaaagcagggctctatttggctgggagacattgatgtgactgtaccagtcattaaaatattgagccatcccgtttgcacacacccagccattctggtccctaccccaaaaatccccaaccagatgtttctgtatcccacttataaagagaaaacacctggctgggttcggggactcgcgcctataatcccagcacttttgggaggccaaggggagaggattgcttgagctaaggagttgaagaccagcctgggcaacataatgagaccttgtctctattaagagaaaaaaaaaaaaagaagataaaacacttatgtgtacatctcttcttattggtcaatctctgagtccaagtttgtaaaatgaaaccacgatagaacatgaaagattactgggtgttcaaatttcagatttggggcagagctcaagaaatctctgtggacccacagattaaggtaggctatgatactgtacaaccatcctgcaccttgtgcgatcaagctgcactggatttccggttcctctgtgatgtgacagggcctttcacaggtctttctttccgtctagaaagagtttataccttctttttcactacttctgacttcagtcttcacagttgtccagtactgcactaaaggcccccctttacagactcaattcaattgctctcatttcatagtatgatcacattataaccaactaatggcctgttgagctatatgtattatctgtggccctcacccgccatccatataaactccaagatagcaaggggctgtgttggtcttccttgcctctccatccgtagtatccaggtactcaataattgtatatttcgtaaattaatgaatgaatttttcaagtctcaactcttaggctgtgtgttctgcgaggacactgttcccaatgactgcaggtcaatttgtatcctctccttactccctcaggaatgtatataaatctaattataatggatttcttatattctaattatttttgtatttatgtctctaatagtctctaagctacttgaaattgaagataggtattttgtccattcctaacaaatatgagtttcctgcatagatatgaaactcagtaaagatttgttgaaggaaatgtctgtccaaaagcaaaaagtaaatgatgctttcaaatactagcaactttcagtttttgcttccacttaaatggatatctcatctctgttgtttctcataaaaataaaatgtctactttttgtgtttgataaatgaaagtttattctcataacttctgattgcaatgttcctcatggtaaatgtgtctctaaaatgttaaaagtcaataaatagtgcaatctaaattattgtaaacactctcaaaaggaatatgaaatgcatattggaagaaagctctgataacaaccccaatacttcggaccagctatggagccattatcttttatattttattttactggtttacttcccctgtttccctgtaattttatatgaagagtgtgagtggtatgtaacattacatacaggttccatgttggggtttaaatagcctggcattagtgtatgaggataaagatgctgatggaattttgtatccttttgttttaaatacacttatactaatttaagtattttgatagttactctgtttagcagattcatttcacttttctccttcttgctctgttcaaagaggatgaagtctagattttctgttacccaggttcctcttggcctttggttgctaaagtacttcagccaatgggaggcactggcaagagggtgaaagcagagattgtggtacttttctcttcctcttctgtttcttactgtggagtggctggaattgtgttcctcttaaactacagctactgttggacagctcttgttccatgtctctaattctcactgagctccggcaacagctctcttccttttttcttccagttccggggatgctaggtcagttgtctttgttgttaggtcctggctccttcactatcgtttattatttttcccccgacccttcacataaatgtgtaagtagtctactgagcgaaacatatttgagtgtgttctatctttcctgccaatagtatgcagcatccacacacacactcaacagacccaacttttatattttattgtttgaaatgctatcaatttctaaacattgctttttaaaccctactttaaattgacagataaaattgtatattcatcatgtacaacgtgatgcttctgagtaaatatatattgtggaacagttgaatctagctaattaacatatgcattaccttacatatttatcatttttatggtgggaatatttaacgtcctctctctctacatttttcaagagtatattttcattagctgtagtcaccatgctgtaaaatacatcacttgaatattttgactgtgactatatatcccttgaaaagtatctccatacctcccccttccccataaccacctcagcctctggtaaccactattcattccctacttctgtgggatcagctcttttagattccacatataagtgaaattaggcagtggttttctttctttactggcttatttcacttaacataatatcctccaggttcatccatgttgttgcaaatgacagtattttattcttttttatggctgaatagtattccattgtatatatgtataccacattttctttatccgttcatatgttggtggatatttggattgattccatatcttggccatgaatagtgctgcaataaaaatggtagtgcagatatttctttgacatactgatttcatttcctttgtatatataattcatagtgggattttgtatcatattgtagttttgttgttcatatttcaaggagccttcatactgttttccatgatgcctgtactgattgccattcccatttacagtgtgtaaaggttttcttttttttaattagtaatttttaacttttgcaggtacgtaatacatgcctttttcctaaatcgttatcaacatttatctttttttgttttggatagtagccatgctaacaaaagtgaggtgataatctcttcttttttcttttgacaaagatatcgttaattactattatattttaacttttaggtgcaagggtacatgtgcagttttgttacatgggtaaacttgtgtcatggaagtttattgtacagattatttcatcaccaggtataagcttagtactcattagttattttttcctaattctttccttctgccaccctccaaactccaataggccccatgtctgttgtttccctctatgtgcccatgtgttctcatcatttagctcccacttataagtgagaacgtggtgtatttggttttctgtttctgcgttattttgctaaggataatggcctccagcttcatctacgtttctgcaaagaacataatcttactctttttcatggccgcatagtattccatggtatgtgtttaccacattttctttatccagtttaccactgataagcatttaggttgattgtctttgtgattgtgaatagtgctgccacgaacatatgtgtgcatgtgtctttttggtagaatgatttatattcctttaagtgtatacacaataataggattgctgggtccaatggtagttctgttttgaggtctttgtggaatcaccacactgttttcaacaatagttgaaataatttacactcccacaaacagtgtataagtgttcccttttctttgcaagtaagctgatacctcattgtggttttaatttgcatttcccagatgattagtgctgttgagcattttttcatatctgtgttatccatttgtcccttttatgataaatgtctattttggtcttttgcctatttttaatcaggttatttgttttcttgctatggagttggttgaatttcttccatatttttatatgaacccccatcagatatatagtttgcaaatatttttctcattctattggatatctctttactctgttaatttttaattttaattttaatttttttgctgtgcagaaatttttagtttggtataagtcctcagtctatttttgcttttgttgcttgtgcttttacagtcatattcaaaagttattgcccaaataattgtgatgaagcttgtcctctatgttttctactaatagattgagagttttgagtcttaaatttaagtttttaatccatttcaaattggtttttgtatgtggcaagggataagggtctaatttcattcttctgcatgtagattcttacttttcctggtagcatttgctgaagagggtgtcctgtcctcacggtgtgttcttgacacccatgtccaaaatcagttgaatgcaaatgcattaatttattcctgggttctctattatgttccactgatcagtttttatgctaatacaatgctgtcttggttactatggcagaatttcttctagttgcgtactttgaccttagtgggaaataaaaaacatccttccaaagaaccatattattagtgtttccatattgatcgagtatcttctgttttttttattggttaacactatcatatatgggtatactaagagactcctggcaaatgcccatagttttctaatgtagtactacttgccccgcattgtattgggtgaactcagttgaccatttgtgcttaggttctgtatggtaacccctttctctgtctgtggattcagcagcatgaggagccaaacatgaacagcggtcatctcaacttctagtttaaagaaatcatttttgagtttcttataactcaaaatgttgaagaggtagttcaaaaaaaagttgaagaggtagttcacagataaggaacagaagtcacaaggtggagagagatggataaattaatattaggttaatacagatgagataattatatatagaagtatttatgggtgagtacacactcacacatccacttctttatgtcaacccagaggtcctgtaagctacaacaccctagaagcaaggagcatacctagcaacaggatcttgggtttcagtaacattctttaaagaaaaaaaaaaaaaaaaaaaaaaaaaggaaccagaacactgtggagaaacagctgattctaacactaggaaagggaatatagaaaatgagcctggaacatttggtagtgccagatagtaagaacatgctaaactccacggtctcgctctaaacaaaaaacactgatgggatgtgtcaaagaagccaactaagagacttcccaatgtccaaagctggaactatttgagcaaaaatccaaagcaaaaactagtattggatttagcccaaagtatcaaataactatacatgagtccatgctatgtaaataaataatttcataaataaatggaggaatagagacaaatctccaatgcagaaaaaactccaaaaacttatgtaacttctctgccctcacggagagggaatgtaactccccactccacaggggctgtgtatagtgactttcttattaaaaaacagtgtgaaaagagggggaaagagtaactttatagtggataaacatgacacctattactttagccaggtggtcacatttaacattgataagtcacgttgagggtatatatgctttataaaatgtgcttaaaatggcccattacttctgtggtctttcaaaaaccccagtttaattatgaggaaaaaaaatcagacaaatccccactgagaggcatactacaaaataccagcctggccagcacttttaaaaactgccagaaaaattctgagaaactgtcatagccaaaagcagattaaggaaacaggacaattgagtgtaatatggaatccttggagagatactgaaatacaaaaaatagtttaaggaaatcagaatataataatagtctccagctaatgcacaaatattggttcattaattgtaagagatgttccataataacataagatgttaataaaacgggagactgagtgcaagttatatgataactctttgtattataatctcattaatttttcgtgaatctaaaacagccaaaaaattaaatctgttaaaaaacactctcagctatgtgtgcactttgtgtgtttaaatgtgatgattaatggaaacttccagtaaagattttagagtaaaattatgtattcaaaataacatattcctaattcaaattataagatcaatgttcagaatatagttttgaaaaatgctttaaacatgatgtttataaagagtatttcctttaaaataaccatcagcacttctcatttgcatctcaaattttggttgaattaatgaatgaacaataatgtgttttcatcctcaacataaagttgtgtaattaataggcaaaacattatcccatgtccctgatgctggaaatgtaattgagaacgtttaagaacctggttgtagagcttaccgctgggctgtgaacctaggcctttggactttaaattcattacccagcccactattttctatatctttgtggggaaaaagcaccctttctctagtctatttgtgtgtatcaaatgacgtccaaacttaatgggttaaaacaatttataattgcgtcatgatctgaagaccgagaatataagcagggctcagccaggttgtttttatattactagttttatagctgggggtcaccccttgggctgtgctgagctggaagctcacttctaatacagtattttatcctgcagaatcactcctatatggtctctaatgattcggtagtgtagcctggcctcctttacagcatggaatctaggcttcaagagaggaagaaatacaaatgctgccagttcttttatagcctacacttggaattggtgtggtgtcagttatgccacattctgtggtcaaaaaaaaaaacacaagtccagatcatattcacagggatggaaaatagacctcatctcttgaagggaaaagtgacaaagaatttgtggccatctttaaccaccacacatactaaataatgagaatgtaaacgaacaactgccaaaatatactacttagtcaattatcagatgctttgcacttcagttagcatgttcacatttagttgactatgtgaaagtttttagaaatcaggatttgtgaactattataagtctgagaaataatagttccggggtgactgatagtgggctttacttacatccttctcaatgtccaatagatgcccccaaatgcgaacattccatatattataaattctattgttttacattgtgatgttcagtaataagttgctttcaaagaggtcataataggcttctttcaaattttcagtttacatagagttttaatggatctccagaatcagaaactgaaagagttgaatgactggctaacaaaaacagaagaaagaacaaggaaaatggaggaagagcctcttggacctgatcttgaagacctaaaacgccaagtacaacaacataaggtaggtgtatcttatgttgcgtgctttctactagaaagcaaactctgtgtatagtacctatacacagtaacacagatgacatggttgatgggagagaattaaaacttaaagtcagccatattttaaaaattatttttacctaattgtttttgcaatctttgttgcaatggcttgaataagtcccctccaaaattcaggtgattgtattaggagatggaatatttaagggtgaataatccatcagggctcctcccttaagaataggatcaagtcccatataaaagaggcttcacacagtgttctcctatctcttgaccctccaccatgcaccaccatgtgaaaactctgtgaaaaggccctcaccagatgctaacatcttgatcttggatttcccaaactcgagaactgtgaaaaaataaaggtacattcttcctaaattacctcattctcagttatttttgttacagcagcacaaaatggattaagacatttgttgttgtttttttaaaaaatacagcatagctaggcttttcgtatttggaaaagaaatcaaacatatttgtggatgagaacaacgcagggtatgtgatttattaaaaatttgctttcctggaagacagacttcatagggattacttgtaatgcaaatttaaataataaggctacgattttttttaatgtaattttacattcaatttatagtaaattgaagctggccaagcttgatgataaatgagagtctgaagcattgcttttctatagaatatgacattttttaaatgttaatatttccatcttttttcttcagtttacttgtacatttccagttatgctccctcgctgccagaaagcatttttttttgtttctgttattgagacttctacaataatatttcttatccaaaattatgagggtgctttattttaataagtgccataaaatattacaattagctctgagttttattgttgaaataggctcctgctcaattcatgaggaaacacacacacacacaagatcctttgtaattgtcccaggattagggttgccacatttagcagacacaaataaaagaagcctacttaaatgtaaatttcagataaacaacaaataattttcttagtgtgtgtcccaaattgttcattgtttatctgaaattcacattttgctgagtgtcttttattttatctggcaactctacttatgatctgtggtttttggatttatggctttgaataggaatatctgctcctttacctcataccttcgaaatctgccttttgtcaaacttaattctctctttttataatattcagtcatatatagctttacagttcttccatgcaaatgaaagatacatttatttctaagttctagagttttttttaagtttaatgagcttcagttttgaatgacaaatggggccagcccttactattattgacccccaggagtcctctaagatctagcatttaagaagaactgtaactatggtaatccccgtctgctatgccatcaggaaaaaaacatcaactgtattgcaattatgtagaaattgtaactgtgattacttgtcatatagatactaattgagcacctgaagaagaagttaggtacagtgctagttctctaaccgtaccgcttttccgatgtggcacatttgcttctctcgttgacactatatctgccctctttcccttggcctacactggaagttacatgcagaaagtgtctatataaaccaggggtgtccaacccgttggcttccctgggcgacattggaagaattgtcttgggccacacataaaatatactaacactaatgatagctggtgaactaaaagaaataattgaaaaaatattttaagaaagtttacaaatttgtgttgggccacattgaaagccatcctgggtcatggattggacaaggttgatgtacagcaatggcttctctctaccggagggtatttctggtgcagaaccatttcagccagtttgaaggtggacaggaagtggaattagtgccaccagagctgcccttagccaatgaggagtaaaagttgatagagaaatcctgtagaatctttgtcccatagtgggacatttctaaggtatattctccacagtctttcagagattccccagtaagactgagctccaggtatccacagggtaacttcctgaacgtccccgtgctctcataatgccttacgagttcaccctccaaataaaccatttatttgttcacaaatcttttgttcaggatgtgtttttggaggaatctaacccaagacaaacttctcccactagaagccagaattcgagctccagttctaccactaactaaattgtcattttccaaacatcacttaatgtcccaggttctctgtatctttactttggaaataaaagagtgagtttgtttctagtgttccttccagtcacagtttaaatgtgtccaatacttttggaagttgaagtattttagaaaaggccaagattaggccacgtaacactgaacatcagaaggcaggacactgctgctggatgcctggagtgtaaagcgaaatccagggagaagagctccaaaagagcagtagaagaagaatgttagcatagctaagtacggataacctagggcagctatgaaggaagttcttagcttgggacgctgaacagactcttcattaaggtgagacaagctatccaggatcttaatattctgccaggtacctgaaatgttttgtagttttttctgaaagatataatgtgaatgaaatggaaaacgtttgacaaatattgtcataaaatttaaatatattattcattacttgaaagtatgccatttctaatgactatgaaattgccttgaagaaaaaatgtgaaacaaaagaaggcaacaggagtatatgcaagttgattatgtaacattttacctccaggcattatttatttatttaaagggcataaagaggccagaaggcattggttttctggctcagagagtaaggccaactcctacttttaactatttgagcactcttttttttgacagatttgacaatattttttgaaatatttgacagattttttttttataaaaattaagggaaagattcatattcaagtcctgaatattgataatgctcttttgtttcttggcaacaattttggcgagaagaaggtgacttaacatcaaacaatttagcaaagagttgactttatttaaacctgaaacatgtacattatattgtcttttaagactaaaaggagcatacatacagaattaaaggaacactgttttgttagtcttgccacacttcataaaacaaaagaaaataaatgttacttctttgggtaactgagttcaaactaaagccttatttatatagtcgttgaatcgctttgcagctttttttcccaagaattgtaaatcattgaaagtaaggaaatttctccttctgacaacaaaatgcatcagtaaccttagagtccccacaaaagcaactcccatctgctgcatcaccaaacttctaacctaatataatatttatttttagctttgtgtagatagacattaaatccttgtgccatcaccattttttcttaaagatgattgcagatgacaaaattaaagaaaagatacagattttattgctgggaattgatttaaattctgctcagatcagaggtcgcctgctctctctctctcaactggagggcaagattaaaatgtttgcaaatcttgcaagtacactgtgaatattacagatatgcttctgtatattctgtgacaggatcctttgctatcttcatttcaacagcattttattatgaggcaggctagaaattcagacactgtgaaatgtcaggaagataagtcacttttactgaacctggcaattaggtaaggtaaagcaattgatcctatatggtggttactattaaatctagccaaactctttactctgggtaaccaagaaaagttcaattggctgcaccatttgggagaaaccactcatccttcatagacattgctgtagggagagaatttagaggtttgctttagctttgaggcacccaagagtgagtctttctggggagtaaacaaatcgaacctctcattcccctgtgaaaaaatatatcacatataattctagctggtcttttttgtcttaaggggtagaatttattagtgatgttgacaaagaatgaaaggatttccctcgaaggagtggcatgatgctattgaggaggaaaagccttgagctttcattaatagtaaagaagtttgccattttggaggcatttttttcaaaaggaaaatatttaacagtgaaatcttttgtctcctggcacagtgagactgcgatgaagtttaaagctgagtttactagctaggttttccattcttttgagagatttagacttttgtgcatagatgcataaccttggtgacagcatcaacaaagactttacaaattacaagaatttgccgatgtgaatatatactctatattctgacttcagtgaaggttatatgtgaaatactgattaatacaaactaagtagcctcttagaaactcagtcacctatccttttcttgaaggttagttaaaggcagacatttgggttgccaagattgtgaaatatcctcatctggtgacctttaaaatgatctagatgttcatgttacagagaaggattaggtataattctgccaaaggatctgacatttcatttcattccattgcattctattccatatcactgaacaaaccctcattatagcacatgggtgctgtgaagaatgcagaaaccaatcatttacgatgtcttgtactatactgaatgctggaggatttaagcctgatcatggagggtgatcatgagtcttatataaaagactcaggcatttgcagtagtagttctatgagtaacaggaaaccattattcatgagaaattaaactagaaatagcagcaatttaggaaaacttatcttaatatttaagaagatattttttgaggataaataaaagagcagagaaacaggaggccggaaaacatgttaagaggatattgctgaaagtatatagagcctgaatgaaagcaatgacaacaaaaattgtaaacaggtacaaagcattctggatatcaaatcaaaaccaataggactagatttaggatatgaacaaaaagctcaaagtaatagattctgggactgggcaattgggacttgagattggtaattaagaaaataggcagtgaaaaagagaaatgcaatagttggaagaaggataagtgattcagttaagtttgacagtgccataggatcaagtggtgcttttagtggttagcaaactcactctcatatttagcaaggttaaaattacatgttgtttgtttctgctatgaagtttcattttatttcctgtcttttgccctcataagtgcttaatgaaagtttaatggttatgatggtaagggggataaacactataatctgaaaaaatactgtattataaccagagagccagatttcttttgtgttttcagagtgcttagtcaataattgatgctcagtaaatgtttttagaacacatgttctgattatattgactagttttattatccaaatcgtctccatcatggctaactttctgacaagggcatgaaagtttgataatttcaattaaaacgttgggcatacagcaaaaaaaaattcataaagctgtagaaaaatacatctgtaaagtggcttacctggtgatgttatctctggtgtcttcaatctctgactttccttttttccttctatctctgttgcattcccatatgcaaatatcttaatagtgctaaaccattgactatgaaattggtttgagtggtagtattattttgacataaatgattggaagtttatgtaaaaaagaacatcacacttttatagtctacgtagtagtatgtgcatgatattcagttacaatttttaaaatcgaattgagaagacatctaatatcccataagaattctattaacaagcatcatattccaagggtatatttgcacagtaatgctatagattattaaaataataataatataaaatccatgcccatattcttattttacaaatcaagtatttctagctatcagattattatttactttattagaaattactgagtattgattcagtaacattacttagaatgtcacagctttgtttgacagtatatcggtatagctacgaaaattatacctgatcaagactctgtcatcttagaggcactaacattagttattatacttcattactcttgtaatacttcctcatgagaagacactgacctctccaatggtgtttaaaggaaaaaaataagtaccctatttctaatttactgagttagtctcatgtaaaatgtctctctctctctgaaccagtactgtaacaatcaatttcagttctttcgtataggtaatacaaaattaataatgtagataaactaattataaaaaacattttaaaatgcattttagggaaaccttacaagaaagctaagacacacatgataacatgaattttaaggcaataattttccttatcaaatgtatgaccgtatcttataacaaaatgcatgtccgtaaatccaatcccgtgttaaaatataaggttgaatatgatactttttctgaagaatatggagaactatcctgtttaatatttctgttatgaacagaatttctagtggatttctaatactagtagatttctactggtacatctggtagtactctcttattcattggaagtaatgatactgtatcctttaacaattaaatttttatctaagtcatatctagtaagactaaaaaagcactaaactatttttacataatggtctacagttttggcacactgaggatatttaataatggaaatataatgtgattaccaagttattagaaataaatagtgatgctcaaaagggctatttccatgaatctcagtgtaagaatgcaaggataatgtgaatacgtcagaaatgaaagaaaataagcatttcctcaccacctaccaaatctaagcactgtacaagctgaagttaatgtattgtctcatttaactctagtaataagcatgtcttagaagaagttttaaaatagattgagggggtgcatgtgcaggtttgttacatggatatatcgtgtagtggtggagtctgggattttagtatatccataatctgaatagcgaacactatactcaataggtaatttttcacccctcacccccctaccagcctataatcttttgtagtttccagtttatattattccactctagatgtccgtgtgtaccctttgtttagtttcttcttataagcgagaacatgttgcatttaggtttctgtttccaagttacttcacttaggataatggcctatagttcctattcatgtaactgcaaaagacaggatttcatactttcttaggctgtgtagtgttctgtggtgtgtgtgtatatatgtgtgtatatatatgtatgtgtgtgtgtatatatatatatatatatatgcgtatatacacacatatatacatgtgcatatcacattttctttatccaatcatttactgatggacgcttaggttgattctttgctattgtaaatagtgctatgataaacatacaactgcaggtagctttttcatgtaacactttttgttgtttttgttgagtatatacccagtactaggattgcaggatccaatagttgtgttttaagttctttgagaaatctccatactgttttacataatgtttatattaacttacattcccaccaagagtgaataaacattttcttttctccacatccttgccaacacctgttgttgtttgacttttttaatgacaggtatccccttaaaaaaatgagatactgtcatttggaacaatgtggatggaactagagatcgttatgttaagtgaaataagccaggcacagaaagacaaacatctcttatgttctgacttatttgtgggatctaaaaattaaaacaattgaagtcatggaaatagagagtagaaggatggttatcagagactgggaagggtggtggaagggaggtggggatggttattgggtacaaaaattacagttagaaagaatgaaaagacataatatttgatcatatcatacagtaactatggtcaataataacttgtacattttacaataactgtgaaagcatataattaggttgcttgtaagacaaaggacaaatgcttaaggtgatagatactaaattctccatgatgtgattatttcactttgcatgcctgtatcaaaacatctcatgtaccccacaaatacacctactctgtacccacaaatttttaaatgacattgaaaaaaacaaataatagccatactgattggtgtgagatcatatctccttgtggttttaatttgcatttctctgatgattagtgatgttgagcattttctcatatgtttgttggccacttgtatatcttcttttaaaaaatgtctgctaatgtcctttgcctactttttaatggggttatctatttttcttcttgttgagttacttttagattctagatattagttttttgttagatgtatagttcggaattgttttccattctataagttgtctgttcattctgttgattgttttttgtttttttgtttgtttgtttttgctgttcagaagattttaaaattaagttccatttgtctacttttgtttttgagtacttagtcataaattctttgcccaagccagtgtcgagaagagtttttcctaggttttcttttaggatttttatattttcaggtcttacatttaagtctttaatacattttgagttaatttttgtatatggtgatttatgacccagtttcattcttctgcttatgactatccaatatttacagcacaatttactgaataggatgtcctttccccagtgtatatatacatttttttactttgttaaagatgtgttggtcatagatatgtggttttatatctgggttcttaatttggttaaatcaatctatatgtatctgtttttataccagtaccatactgttttggttactgtagccttttagtataatttgaagtcaggtaatgtgatgccttcaactttattcttcttgcttagcattgctttgactatttgggctcttttttgattctctatgtattttactatctttttctaattctgtgaaaaatgatgttggtaatttataaggactgtgttcaatctgtaaattgctttgagcagtgtggttattttaacaatattgatgctcccaatccatgagcagggaaagtttttccatttgtttgtgtcatctatgatttatttcatgggtgttttgtagttctccttgtagacacctttcacttttttgtttaaaggcattcctaggtattttttttttttgtagttgttgtaaatgagattgagttcttgatttggttctcagcttgatcattattggtgtatagaaatgctaccaattttgtacattgatttcatatcctgaaactttactgaagtcatttatcaaatatagggtccttttggaggagtcttaagggttttctagatgtaaaatcctatcatcagtgaagagaaatcatttgactttctttttcccaatttggatgccttttatttctttctcttgcctgattgctctagctaggacttccagtactatgttgaattggagcagtgaaaatgggtatccttgtcttgttgtagttcttgggggaggggggtgctctcaacatgttcctgtttagtatgatgttggctcttggtttgtcatatatgacttttgttattttgagatatgttctttcaatgcctagttgttgagggtctttatcttggggagaggctggattttatcaaatgccttttctgcatctattgagatgatcatatgttttttgtttttaattctttttatgtggtgaatcacatatattgctctgcatatattgcaccacacaaaacatatattgtgttatgtggtgaatcacagatattgctctgcatatatccctgcctacctggcataaagctcacgttattgtcatgtattatctttttgttatgcttttgggtttggtttgctagcattctgttgaggatttttgcatctatgttcatcagggatattggcctgtggtttcctttttgttgtgtccttacctgcctttggtatcatggtgatactggcttcgtagaattaattagggagaatttcctcttgtttgatattttgcaacagttacaataggattggtaccagttctttgcatgtctggtagaattcggctgtgaatacgtctggtcctgagctttattttattgggagatatttattactgattcagtttcactatttgttattggtctgtccaagatttttgcttcttgtggttcaattttgggagttgatatgtatccaggaatttattcatttcctccagattttctaatttgtgtacctagagatgcccatagtagtctgataatctttcgtatttctatggtatcagttgtaacgtcacatctatcatctctgactttgcttatttgattcttctgtttttttcttggttaatctagctagtggcctattaattttgtttatcttttcaaagaaaactctctaatttttttaattttttgtcttttattatctcagtttcatttagttctgctctgatcattgttatttcttatattctgctagctttggtttcggtttgttcttggttttctagttcattgaagtacaatattagtttgctaattttagatctttctatctttttggtgtaggcagttaatgctataaatttccatcttaggactgcttttgctgtatcccagaggtggaggtatgttgtatgtctctttttatttgtttcaaaaagttttaatttcttccttgatttcattgtccaaagatcattcaggagcaggttgtttaatttccatgtatttgtatagatttaaggagtcttcttggtactcatttctagtttttttccactgtggtgcaagaagatgcttgatatgattttgatttttttaaaaatgtgttaagaaccaccttgtggcctagcacattttcaatttttgataatgatccacgtgcagatgagaataatgtacattctgtggtggtagaatagaatgttctgtaagtgtctggcctggaaggatattaatacttgattttacagacaaatagatgtgttcaaagagtttaaggagttgttcaaggtaacttcagtattaattggtagattctgattttaactttgacctgtctgcctttgagaccatttctctccattttgagattccagtgaagcttgactccacctgagatcctagagactagagcagttgcagagaagtgacaaagagatttgaagatgttgtggcatttggattcccaggattgggaatgtctagatagaaggtacagagactgtgtgcatatgagtcttcaaacatagagtaagcagtagtggtagctacacattaaatactcagaatcaaaatgcttaatgaaataattcatcaccattactcctgtagttctttaaaatagaggaaaaagagactataagggaaacaggaatataggcttatgataagaatggcaataccgtctgagcaggaggataatcattggaactgaatttcacaactatattctgttagcagcacaatgcatagcatttcctctgtgctctgcctgaaactttccaccccaactctctcccaataatcttcttttctttttcaataattattttcagtaaaggcattttataattatttattcaatgttattggtttttaatctgattttaattctgtaactatatgcagaatgtatgggtgggtgcatgcatggattgtagaaagagtaggaaaggcaagagaattgagggctaccatttcgtgattagggactgtcctcactccatgacatatgtctgcccatgcaaatttttctgtgataaccatcagatgaggtagtttgaacctacttttattaatgtagtgtaaataaattggaagttcaggtattatttaaggatttaacacttactgtatatttctccagaccttaaaactttgctgtaacttcacttgttttcatgacttttcaaaaatcacattctcttcctgcacttatgatgtctattagaaaggatgatagtcagaatgtattagatgagggtaaaatagattagtattaggttaggtcattgcagtttagtttcaaaactttgatataaatatggctaaatatgaattctttcaactaattagatgctaatatttttggaatttatattgttttccaggcaaaatgcaaaacagttttaccttattcaatcttcttaaccacataaagaaataggcagttttattatcttagttttacaaattaggaagctgaggcttggtgtggttgatgactttctcaaagtcacgtgattggttattgatgcttccaggaattacacatagaaaatctgatttcagatgctacacttttgactacagttttactgtctcctcatagtcatgcacaagttttggtcaatctatttcatcctatgtccttttccatatgtaggagtacattaattgtctactttatttttaaaacagtttcttttcgtatttattgagtccccttcaggctattgagaagcatttagtgtgcttgtatagcctttcaaatctctccattgaaacagtctttcagaacccccatttggtagcttaggagttggcagaaacataaacattcatttctaacaaaaagataaaatcagtgtgttctgatataagaactaataaagatattcaatcacatttaagtaagtgaatatcaaaagcttttctagggtagcctgttgaggaagattatttaaaatattcagcaaatttataacaaagttatataccgtaaatagatcttcatggaaagctagacaatactgtgaccagccaggcttagcaaagtgaatatttcactgcaaataaaatcgaaagtcctttccagatcatatcattcaggccagcaagggatatagagcctagcccagtgtagaggtggtagaaggaatggggcatagaggaaaagagtgaaaaaaataaattacctaccaccccatcatttcccaagaaatcctaacactttctgatctgtacttgaagtttttatttgaaaaaaagtcaattcctgtccagatgtcttgaattaacatgatcattagtatctagggatttttttgttcatgagacagcttttttaagatacttctttcctggatgttagactcaactctattcctagaaccttctgaattcttaatgtcctttgcaaattttatgtttgctacaatttttttctcgttagtctttccttatgtgtgcatttattgagataaactacaaactactgaatatttgtaattaaacatctaaatatattaattttaaagtcatttttggagacaatagattgccttccaattcatgatgaacagcgttctgtgttgtttctaggggtgtgttttgtgtgtgtgtgtgtgtgtgtgtgtgcgtgtgcgtgtttgtgtgtgtgtgacctgcaagtaccggcaattagctgttgggtattcaatgaagtcggaggagtagttaaaaaaaaaaaaaactttacatataggtaacagctgttcttttcctgttctttccatagctgagtctatgctatggccaaaagaaatagacaagtaaaacaaaagcttctcccatcgaatttacaggatacccatccttgtttttgttttctattatactgcctttcgattaattattgctcttcacctttaaacatcaaatcaaaaatttccctagccttacataattccatgtctttatttcctaagtattattttacatgtgttctaagaaagggtaaaatagcatagatctagaataaacactgaagtggctctccagtggtttttctaagccacttttgaaaaccaacttgacatggacaagagccagaagaattcagtatcactgatggcatttaaaagaagtacaagaaaagtcaggtttaaataataaaattgggaacatgtactaagggagtaacaaattttgttaagccctttaactagagacttatttagaagaaatacaattattcacagaggtataacaaaaactgtttgtccaatctaggcattcttaatgttacatctcactgttggccttttctcttgtcataaagaaaaaaatacattatttgacatttgacaacaaacattggtaacatttgtatctaataatggtaatgaaatttaactaggaacatgatagatgtttgaaatctggtaagtgttacaaaagcattcctttaataaaataatgaaaataaatgcataataaagtacctagtatgtgtgtatatatgtgtatgtgtatgtacaatctggaagcttttaataaaggaaaacattttaacaatattatattacaatattttaatttgaaggtattattttctgacagacaaacatttttgtgtacttctctagggatgcatctatatttggaaactatttggctcatatttcaggcttaattagcaaatccaatataaatctccgttgtataaattcatctatgacaaattgaaatccataagaagtcagtatttaaaattgtaattaaatatagccttacaacactttagcatattattttttttaaatactcttgagaattcatttctttccaactggagaaacaggcaggcattctttaccccaatgatcaaggcctttattcatggattcctagtttggcagaacaattgaactttttaactccagctttttatgtctggcgtttctgctacttgtaagaatcagtgtaaaagtaaaccctgaacgttgcatagttcataatctgtattttgctgatattaaggagattagctaatacagttatattcactaatatttatttcgcatttgaagtctgagaaaataggagacgtgcttactgttttaccatagcttttgtcttacagctatttagtgtgctcaaaaaagtcagtttaaccttttttagtttaattcctaattagctgagaaagaagaaatacaattttaaaaagtcatagaggagaagagatactggaaataacattaaatcaaatgtaccttatgcaaatctactccagcactctggactcttcaacgttcttagtcactgtagagagcctttccccactcctttatttccttgtactcaccgtaagtccagagggttcttgtgttagattttaatgctatcatctcacaactctctttagtggtactttacgttagcacttctgccaagcataaaatataaacccttgatcaatatggcaagaatgccatttccaattataaaacaaatagatgaacgaaacaaaatcagaacaactaagtaatggagaatatagtacgtttgatcacatagactttaaaagactcaataagagttggattcattccatggatccaatgtttttcttacacttcttaagtaaaatatattaaaattgtgaaaaagcaatttacatgtaaaaatgaaaactggcattatttacttgtaattttgtaatatatgtaattatatatactcattgaaggacagaaaagaattgactaaattcagaaaaccaacttatgatacactggccaccaaattatcattttaattattatttgaaacattcccggctgacaccttcaaaatgttcccagtcctgtcttatataactcagaaaacacagactcaacatgactgtcaaggacaactctgaattttaatgtttccatttttggcctcatggcaaaaagagttttattaaccattataagctctggaatgtcaaaggcatgataggcagtatagattgcacacacaaaatagatgcatagtcattttattctaaattgcttcacttgaaaatgtagtatgaaaatctagagagacgaagtaaaaagaagtgattttatagtgttctaaaatgttgaggcttcgaaaataagaagcctaggataaaaatgctcatgcatttgagattgtgattcagccatcctaataagttcccttccacctgccatagagtttgaatacctaagagctagactgataggtgctaagcactgttgttttgcaagtagggacagcacgtttgccagaaagtaacgggaaatgtcccaaacttgtttctccactcttgtgttatgtaacaaaatgttctaagaaacaaagtagttgcctagaagtctcaaatagctattcagagaaatcccaataataaatagtgtaacagggtaaggtcttatgggatctggagcacccaggcaacataccttggttctagagcagcctcctttgtttacccctaatttattcctgtgtttacccctgttcatcattacaaaataattgtacatcatgtttttaaaaagattggaaatactgttttgtgacagcctcacttaatagggggaaatgattttttcagagccacatttgtaagttagaaaggcagtatttgaattattctggttttatcctagggttcagttgagaccaagtggttattttctgttgaggttagtgtaattgtgattacaccaaaaatcactaattcttcctattatattgtaatctttgtgcaatcaggaaggaacaaactcatctgtgcatgttttccccaaacccccacatggtaccatttatctgacaaatgtttattgatctttatttgcttgtaatacatagtgagaaggacagagggcatctctgttctagtggactgcctattatagtaagtagagacaaaaggactaagctgatacataagaaattattgagtagtgacaatactatgattaaaaaaatgacagaaatggtgaattactagggagcaacattggatagtttgctcatgaaaagctgctctaggtaggtgacacttacattgagtcctgaatgataaagaaatgatttaaacatctggaagaaaagcaatcctggtagagggaacagcttgacacatttttggaagagagacaaagcaagtcattctgaaacactgtgagggcgagaatggtatacaattagactggtgaggtagtcaggtgctagatcatataagaatttcaggtagagaagttaaattttctttcttagtatgatagaaatctattggtttttataaatcggactgacatctgatttgtagtttgagcggaagggaaaaaacgagtaaaggagctaaaaagtagtgtataggccaggcacagtggctcacgtttgtaatctcagcactttgggaggctgaggtgggtagattacctgaggtcaggagtttgagagcagcctggccaacgtggtgaaatcccgtctcaactgaaaatacaaaaaattagctgggcgtggtggtgtgcacctgtaatctcagctactcgggaggctgaggcaggagaatcccttgaacccggtaggtggagtttgcagtgagccgagatcatgccattggcattccaccctgggtgacacagtgagaatccgtctccaaaatagaaaaaaaaaataaaaaaagtagcacataggtaggagggtaatcaagagaaggtgtcaagaatgagggagtggccaattaggttagtaatcaacatgtcaagtaagacgctataacaaatggttattgaatttaggaacatgaaagttgatggtgtcctttacaaaagatatttcaatgggttagtgggcaaagtgaatagtaggataaatatgtaggcacagtaactataggatacatttgtttttttttttttcagtgaagaggaacacataataggacagtaggaggaccggtttgttggatcaagagtttgttttatttttatggtaatggagaagttcagtagagaagaagagcctgaaaatgccagaagtgctgatagttgtaggaaaaaagtccttgaaagggagaaagggggtgggatgagaaggagaacatcctgctgtacctttcttaacatttgtcttctctagatactttccagttaaattaacaatagaacatataaattttgctgagcgtcatagcagaaaattggcttggaatggttttaggttaataaaaaatgggagtacctgagatgtagcagaaataaatttcaccatttgagagcaaatcatttcaacacacatgtaagaatatcattttaatttcctttaaaacattttatctttcaggtgcttcaagaagatctagaacaagaacaagtcagggtcaattctctcactcacatggtggtggtagttgatgaatctagtggagatcacgcaactgctgctttggaagaacaacttaaggtcagattattttgcttagtaaactaaatatgtcctttaaaagaactataacttgaaaagtattttaaaaatttagaatgcaatttatatattaaaatacttagaatacaatatgtgtacaatatacacacactcataatcagctgaagtgctgtgatttaaagaattccataattctgatacaatagtaactaactgcggatgggtaaaatctaatactttaccagaaaatttcaattaatattaaataaggctgggaagcaggggttgaagggaggttactggttaaaaaaaatttaaatgcagacatttttctaaggcatggagtatttccatttaaaataacaattgaaagcacccatttcatcattagctgacccagtgtgaatagcttttcaatataattcatccaaggtgatgcttgtgtggttaaggcatcttgaaaaacagtccgtagaactcacagatggttgtatggtgggcctatactcttctgtatttgttttctacttgctttcattttcaccttattttctgcctttatttctttggcccaaagacatctactaaatatcggtaaatgtactgattatccctaatttgcttaaactctatctgcatttgtccatgattgcatacccctttaatggctactgccttccagcctcctcttttgtcttcaatcttctttcctcttttgatgttctcattttgcctctatatagctctgtagtgtcatgtgactttaagataatctagactagtatctaaaagggcagcattaaaaggaatcaagtggagagaaagcccttgctataacttttctttgattccatcccatcagttccttcagtcccaaaagaatccatgcttgagttctatactttatttaactattggctggaattgtcgtggaatgctctgcttccatttgactttgaaacagagatgattcttaggttctttgcaagtgatataatcttgtcttacctagtttactttttaaaagcaagaagaagaggacgagaagatggtacagaaggaggagtaaggagaaatcataaagtattaaaagattgataaagtataaaaacataaaaaaatttaacacaaataccctgggtatattataattctagggtagcttcagagactgtggactttaatatgtttaatactggactgagagggattctggtagacgtaattagaagaattacaggaaagagaaacaggtatttggatcccctaaaagaaaaacaatcatcaggactcagagaaggatcttagcaggctttttattagagcagagtctggctatccttaacttattcctcaaaacctattagtgttgagtgcccatctcacgccttctcttccttcgccctggcatccctcatcaccacaattccttcatccattgcactaaaattctgttgaaatgccatccagaggctcaaaaaggatagccagctgtctttggtaaagaggtacagatgggggaaagtaggaagggaagtccccatttagtccaataaggaagagagatgcatacttaacaccctgagttagaactctaaaaatacttccaataggatatatctgcatgtattgatttattctgtaaattctattatgatgatattttaggatttctctaactttaaaatacctttagagtcttctttggaaaaggtttgaagaaaaccaaagacaggtcagaatatatgcttagagtttctgaaagatgacatagcttatgaagtgtaatattctgaaaagtgtgctctccgataattagattctttctctcaaaggttcagcttgtccctcagcaatgttactgcagattagagtcttgtccttaactttagaggcttccaggatgtcagtgcgtagagagtctgtttcataggcagtgatgccagttaacttatttgattgagaaatatttttataaactaaattttataactaaaattggtcatttatatagtcttcagttttagaggtcattaccacatctctttctaagcattccacatcccatttgaatttttttcaacaagtactcgttatgttcttactatgtcccagggattgtgttgggtaaccaggtaagacagttaaaaaaaagaatttgtcactatctaccctggttgcgatgggtaatttgagagcctactgccttccttggaaccctggaacaatggtgactatatctcagtctccctctttgtagtagaatgctaattccttgtcatccatggtcactatgataggcaggtaggcatgggaactgcgctcttggtacatgcaatccagtataaaaatagacattaataaagtatttttaaaaatgagcaaatgttaaagaatggatgcaacttatttataaaggcaaaaaataagcttttgtgacaggaaattactctgacttagactgaactttgaacgcaacagatgattcctgaggaaagttttctttaagctaagatctaaatcatacattggaggaaaatggataaagtgtgcatgtaagtgtcatgggatccttgggtgtcactttgccagccagaaacctctgtggccggcagcacctctgtctgggttttgcttgtgcccgctgggctccttgcacccactcagcctggcaggctgtgcttggcttgcactactggcccggatccccatgcctgccaagggcaagccaggcacagagcagtaagaggtatgtgagcaagcgagcatgaggcctggccactgtgcacagacaggcatgccagctgcagcggaaggcagctacaggcaccagtactggtggcagctccatgtgaggctgtggctggaccagatgtaccacaagtagcttctgctgcaggcaccaatgtctggacaggggatcgcggtggcacctgaaagctcagagacaccaggaaccacagagccccaaggagcatgttacagcatgccacaaccctggcttgaggagccccaaggtctgggctctgcaaaaggccacagctcttctctgtttctcattgcccatagcatggtgagtggggggcatgtttcagccctgtttgtgttacagctctttttgtcctgccattcagcaagtcctgagttcttgtcccatgtccaggaagaatgaggtacatggacaactggagggtgagcaaggtgcagaggagcttcattgagcgagagaacagctctcaggataccacggtgggtagctcctttccacaggcaggtcgtcccagggagtgtgcagctgtgagtagagaggagacccatggtgggtggctcctttatgcaggcaggtcatcctgaagagtcaaggagacacaaagtaggtagctccttcctgcggctggtagtcccaatgtctaagtttgtctgagtctggggtttttatgggctcggaagggaggaggtacattctaattggtccatggacatccatggataggcccagaaaaagcaccataagttctcattctgggccacaaactccacccagaactggcagcccagcccccaggcttcaggccattcttggcttgaaggaggggtttctctgtggatctgctcctttctgcccaggagccagtctgcctcctgccaccatcaacatgccatccatgtagcctaggcagtttataccaaggggtacctgcaggcccacaccgaaccatcctcagtccccactcagcctctctcccatgctcatcagtgcccaaagtccagacgggcgcaaggcagcagggggctggcatgccagcactgtcccgagcacacacataaccagtcaggttgcgacaacacctggtcttggccgcaactttgcttctcccaggagccagtgcggggagcgaggagatgccagggagtgggagcaggcacttcttagtatgtggaggcaggggggcttcccaggcccccaagagcgcaggaatgcccaggtccggagctgtggctgggtggctgcagctgcacctggaagcatggggctcccaccctgccaactcagtagggagcagcgctcctgcttgttcctggcccttggtggctccacacagtgcacagccctggccacgcctcccttgctgcagctggcatctttgcagtggccgctccagacaggctgctgctgccatcataagtgagattggtggaggtgggtagagtttctaggatggataaatggtaaatcaagagagcgtggtttataaaaacttgcatgaaaaaagactataaaaagaccataaagaaagccttttgttcttgggagataactgtttctaataaagaaagaaggagaaacatggttaagcccatagcttatagaagatgctctaatgaaaatgtcttccaaagaaaaagcaaaaccattaaaaccctatttttaggtatgttattctgtacaagttaaaagttgagagccaactatagatgtattgaaggtctgtgtggtcatagaaccaggagaatttctgccatataaaaggcatttgaattattttgttaaaatactttaatattgaagttactgcctaatattttggagaattaaaagtatatgaaaagaatgaggctaggtacagtggctcacacctgtaatcccagcactttggaaggctggggagagaatattgcttgagcccagaagttcaaagattagcctgggcaacatagcaagactatcatatcgtattttgattttcctaataaaaataattataaagaatggataaagacagagtgtattaaggttctctagaaggacagaacccactggatggatggatggatggatagatagatgtatatatgtgtatataaaatatacatttaggagtttatcatggagaattggctcacatgattacaaggtgaagtcccatgatacgccatctgcaagctgggagaagagagaacctagtagcctggtgcagtccaagtccaaaagcctcaagaccagagaagctgacagtgcagctctcagtgtgaggccaaaggccttagagcccctgggaaatcactggtgtaagtcccccagtccaaagactggagaacctggagtcctggagtctgatgtccgagggcaggaggagaggaagccaactgccccgcagggcacaggaagagagtgagtaaacttaccaagcaagctactttatccctgttctcctggctttgttctagtctaactggcagctgattgggtggtgcccacccacattgagggtgggccttcctctcccagtccactggtccacatgtcagccttctttggctacactctcacagacacacccggaagaaacaatacttcatcagtgatctaggcatccctcaattccatgaagttgacacataatattaaccgtcacaacaagtattctattttcaagaaggaaaacctggaaaacacaattttggatcagattattaaacatgaggccatgctcactggtatggtttctcacttatctcatgcagttaataaacatatttattgcctgaaggaataatttttgcagatgagatagttttctaagaactaagctacattcgctaaaattgagtcatgtaaaccaactttatatcagatgacattaaacaatttgtagaaatactttgtggtagtattaagacaaattattttgttagacttattaaattggctgatccaatggaatggaatgaatttgaggtattctgattttcctgaaccttttagcaaagcctctgcgtgatactgtttattggtaaggtgagtctatctttctctatgagtgttcgtgggtgagtctgtgttttaatatattcctttctagtatctgatttacgtgctgaaaattctggggaaggaagccatttgaggatttagctggggctctgtgtaaagtgtgcccctgtaggagtggttaatggaatatttctgctcccatattaacttagaaggtttatagctatgtcctgaggagttagaatatcatatacaaatgttacatcctattgttttaagtcagaaaactcatgtttatagttcgaaatgttgctgctttttaaaaatgcaagtagtataaatcagttgaattagtttgagatacaaagggtctgacttcccatctatagatataaatgtaaatatatataaatgtaagtgtgtaaaaatacatgtaattttgtctatataaaaatatatgtataaatgtgtatatagttaaatttatatacatctctttatgtttctatatatatacatacgtacatctttgtgcatatgtatatatatgtatatacatacatatacataaacataagcacatatgagatagagtgcacatgcttactttgaaacaagcttgatattaaggatgatacagattcttagttaatgcaatcacagactgtgatatagtgtctagattacatgaactaataattatactctatgctgatttgaatacactgtattttacgcccacgattggtactctatcttagcaggattttctcagatggcagcatcctgtgaagaatatttgtagagtgggcgattatttaattaaaaaataactaatcatagggaaatggcacatgaacactattgtgatggtgaaaaaggaaggcactttctctatggtttttcaaaatgtcataatatcagaagcagacagaagttggtaactctggatgtcttctgcccagatctttcctgagtccattttcttctaattatcttctgaacacatccttgaagtccaaacaacacttcaaactcaacaagatgaaacttacctcactgtacattgccttcctttaaacctgctttccttactgaatttcttatttttgtcattgcactggcacttatcatgacacctgtaccagaaacctagagtcatccccaaattcatccctgtcctttcccttatgagccctttgcatgcaatgtcaaaatatttctcaaccttatcttgtatttattatttcatctttgttcttgtcaacatttctcaaggtataggccatatcataagcccccaaagtccttgccttcagtcttaccgctcttccatccaatctccacattgaagtcagtgtgggttcccaagagcctgtttaatcgttctcctttgcttaaaatcctgagtcactttccagattctgatactttggcctacaaggtatttgattacctgactcctaccagtctctatagacttgtctcatgttatctgctttatgtccctcaacctgcatttgattcatacaagctgtttctgataccctgtatgttacgacctctttgcacataccaccgggtttaaacagacgactctgcttcataagatctgctttgataatttcatctatgtatagaaaactcatttcaagttttcctccatgaaattggccactctacctagtgatgactactccctctttgtgccatgtctgtaccctaattgtgtctgtttgggcaccgatcatatacttttgcagttaatattaatgtgctttactcttttattagaatctaaattacatgagatgtgtcttacacattcttgcctgcattgtcagatacaagtaatcagtaattcttgtaagataactgaatgaacctatgaacagacggttggatataattccaagaaagatttttttgacttaaaagggagagctttttgttgtaaggtaattaagaggagaaactctagaaatagacccttcctgctctgttccttatctacagtatacctttgggcaagtcacttaaccatccttggctttagtttccccatctttaatatgaagattgtattagaacctacattatcagatatctgtaaagggtaaaagggtagttgagaagctaaagcatttaaaaatcactgaaatatagtaagcaataataatattagttactattattatcatcatcagcccagagcattcttacaatgcgataagagctgtggaaagtggtgagctgttcttcattaataatatttaacacaaactggaatctcatgttcaagtatgttttaaaagaggtgacatactgagtgggaagttagacttgatagcctccaatgtcccttccaatacaggtggagtgcaagaaaataaaaggaaatactgcccaatcttatctagtagaagcataattctccctcattctgtagagaacttcagctttaaaaagcatgattctcaaaattactttcataagaaaaaacaatctgaatataatggcaaaatataaagaagtcaaatactacattctgccaattattttgaccaacagtgataatttttaaaggtgacaaatctggataagtagacaataagaatgacagacatttaatggtaacatctctttggacattgctgttagtgtcgttaatagttttaacttgtgtaacatgagtatcacacaggttacaaagggaatgtgctatatctcagttacaaagagaatgttaaaataacaaagccacttggaaagaaaatgctatactgtgaaaggtagttgttcagaaagacgataaagtcagatttttctctcatcacctaaatgtcagttaggtaactgaaatttttatagtacatatcttcgggatagtatgagaaagaaaattttatagaatgttagaccctatcaaattaagaaatagaagttatttatgaagaggaatatggttgaaacattttgatgtttcgctctagttcctaattttatatttggtgaattaaatgcatttaaaaaaaactttaaatgtgatggaaataatccacaaagctaagcatcaacatttgttgcccaagaagcaataattataattattagattattatttttcaggagttttacatgctttgtatgtaatgccaaccctatatcacaaatgagaaagccaatgcataatgaagttaaatccaagttcatatagcttgcaggtggcaaggctgacactggtattcagatgtgtgacaactcaacctgagatttctcccaatctctcaaattcatagtagaaatttgctatgtggccttgtgaaaattatgtgatttttttcagttttggtttactaatcagcaacgggggaatacagaaacctatgtaacacagtaatgtattcgtacctgtaaatttaactcattcatgcaaatactatctatctgtataaaatgcaatatctattcatatatatatgaatagatatagcatttgcatgaatgagttaaatttacaagtacaaatatatataatataaacatatatatttatttattttagcacctgtcccactcaattgcattagtacataaatatttttctcttctagaacaacactgttctagaagagaatggtttatatatgtatatagtttatataagcagtatatatatattaacacctgtcacactcgattgcattagtatataaaatttttttcttttctagaacgacactgttcagtaaggaagttgctatacacctttggctattttgagcacttgaattgtgactggtatgcttgaggaactggattttttattttatttacttaaatataaaatggcacatgattcagttattagaaaacttttgagtatgttttgatcagctttgatatgtgcattgttttttcaactgcacattgtatcaagtataaataaatgttgaatattctaatgaaatttgaacatccaaagccaatgtgctgtaagtatacagttaacgctagatttcaatttatgttaatacacggtctgttgtaatacatttggccaatagggtgttaggtagatttgaaagaacacaatgtctggattactcaatctgttttctattctgactttataatttatgagttgaacaataaattctctcatgataaaaattatcaaatgaaactcaaagataacagtgatcataatacccaccatacaaaattacaggggaaatataagcaagtatgctggaacaataatattctttttttttttttttttttttttttttttttgagacggagtcctgctctgtcacccaggctggagtgcagtggcgcgatctcggctcactgtaagctctgcctcccgggttcatgccattctcctacctcagactcccgagtagctgggactgcaggcgcctgccaccacgcctggctaattttttgtattttctgtagagatgggtttcactgtgttagccaggttggtcttgatctcctgacctcgtgatccgccagcctcggcctcccaaagtgctgggattacaggcgtgagccaccacgcccggccacccggccaataatattctttatgaatgcaagtgttaatacatttacaaaaaatttttaagtttattgatacataatatttgtacatacttatagagtacatgtgatattttgttacactgttgtatataattatatagtcttcctactctgctatcgaacattagaacttattccttctatctaagcgtatgtacccattaaacaacctctcttcattccatccacacactcttcccagtctccagtatctatcattctaatctctagctctatgagatccaattttttagctcccacatgtgaatgagaacatgtggtatttgtctttctgtgcctgcttatttaacataatgacctccagttccatttatgttgttgcaaatagctatatttcattcctttttatggccaaataacattgcattatgtatatataacctgttatctgtttatctgttgatggttctgaaaaaaaaatgcaaactttatggtactttttaaattgaagtatcaagcaaaggacataagttataattatagcttaaagacttattacagaagtaacatactatgattccacatccagaaaaagatagtatgttaccagcaaccaggaaacctccatcaagccctatggtatcataaactcttcccatctcctcaaaggtaacatgtatcttgagttataatgctgcaggttagtcttgctatatttttaacttgatgtaaatgaaacttttatatatgcagttttttaactggcttttttcactggatactatatttgtgagattcactatgttgcatatagcattactttattaattttcatcgctggatagaattactttgtatgaatataccacattttacatattctgttcagaaaattggggttgtttccagttcggaagcattacaaataattcatctatcaacataaattgtacgtatatttttgtgtatatatgtaaacttttgtattaggtatttacctaagaatagcatttcttaatcattgggtatatgcatatttagctttcaagatattaacaaagggttttccaaagttgtataaattcatattctcaccagtagtaaatgaaagtacaaactgcttcatatcttcttgaatacttgtttgttaaactttttaatttgagcctttctggtgactttataatgtcatctctcatttttcatttgtatatactgatgaccagtgaggcggaatactatttcagttgttattggccatttaaatgaactcttctctgaaatgcctgtttttctactggattttctatatttctcttactgatttattttagtttaaaatatatatattctgggtattctttgctgtttatattacatttttctttttgaatgggtaccttgccttttcactccgtaatgatatatctcttcataaacagaagtttaaatttaacatagttcacttcaatattttctgttatgtttagtgtacttttgtcctcagtttaaaaataaaactctctactttaaaattctgaagctatggtcctgggttgctatataggaactgtttgttttacctttcgtattacaatccacctattattacaggtatgaggaagggatgaatgtccattttttcccatatagatccaactgaaacaacaagttggcactgtagaatattgaggaaaagatggtcttattgcaaagattttcaataagaccatcctttcctcaatattctgtggtgtcatctttgacgaaaatattagaaataaaatgcctatacgtgcatggatcagtttatggactctaatcagttttatttctctacttgcctgtcctcatgctaattccacattgttttaattactatagcattatgacaagttttaatatatggtaatatttttttgagatggagtttcgctgtttctacccaggctggagtgcagtggcaagatctcagctcaatgcaacatccgcctccctggttcaagcaattctcctgcctcaacctcctgaatagctgggtttgcaggtgcccaccatcatgcctggctaattttttttgtattttgagtagagacagggtttcaccatgttggtcaggttggtcttgaactcctgacctcaggtgatctgccagcctcggcctgccgaagtgttgggattgcaggcgtgagctaccaggcccagcctgtatctggtaatattgtaaaagaaaaaatgcaccagacaaacaggcaagaaagactttattcaagactactgaattatggatcaagactattgccataggagagagagatggaaatcatttctactgaaagaaagacaggagagaatttaagcactgaggagagctagtagaaaaatactggaagatattagggggttaggatggtgattaggcaatctgtgattgttaattggcacttaatgaagttaggctcctactgtcccacagagactgggagataggcgtgctatcattaacaattacatttcaaagagatggctcctaggtccttgagaaagatattcccggattgtagaagatttacatctcaaagaggcagagaatatgtttttggttgcaagtttccctaaagtaagcgctctaagaaaagagaggtcaggagcctatagtcaaataaaagcctgtctagagtttagtcacattaagtttgttttggtcagttggtcagtaaaagccattttattttcttcctttttaaagattatcttgactgcttttggccatttcgatctccatatgaattttaagaacagcttgtgaaccctgcccccaaaaagaatctgctgtggttttaattggatttcatctattctctggatcaacttgtacagaatcaacatttttattatgtaaagtctttcaatcctttcatttagttaggtctttattttctctcaataatgttttatagtttttaaagtaaaggctcttaaactttctctgagatttatttcttgggtttttatatttttgctgttatgaatatatttttgaaatttcattttctatttgtgctgatataaagaaatacagttgattttttttcttggtcttgtatccaggtaccatgctacatttacttaataatttgaatacattatctgtagtattattcagatgtacatatataggttgtttttgagtaatgacagttttctttctccctttccaattatttttcatgtcattaattttccctgacatattgtactgtataaatactctagtacaatgggagtattgtggatatttatttctcattttaagtctcagagggaagaactttaataaataatcattaagtatgatctttcctgtaggtttgttgtagataccttctgttcttaatattctaagaggttttatcactaccggatgccaaattttatcatatatttttccagaatcatttgagatggtcgtatttttcttctttattctgctatatgtcaaatcacatgacttagttttctaatgctaaaaaagcctttcttcctgtaataaactaaacctggataagacgtataatcttttttgtgtattgctagattttctttgattcatagtttttcctttacgtccatgaaagtgattggcctgttattttcctttcttgtaatatgcttgctaggtttaagtacctgattatgcaggcttggtaactggcttcataactggaatttgcaaatgggaaattttaaaattaaatttttatgtatttaatacacataaaaatgtccatttttaattggaatttcaacattacatttttccagattttccgttttggagtcagctcgaatcatttgtgtctttctaggaattggtctattgcatctaaaattacagatgtatttagataaagttctatttagtccctatggtatttaatagtagtttattagctaccattgtttgaaattgaaaaaaatgtgacatgaactaagaatttctaacctctctagagaaagcaaatgatctgatgatccttagtctgtttttctacatagtaaccagagcaggagtcaagttgccctgttttctctagcacaggctcttcatttagccacagtccccattactacctattctgttacacctacattatcttatgcattttattaggtatgtacgttagaatttgtgatttcttgtggatgaaaagttgtgatgtcaagagttggcatgagacatagagggatatttatcttctatgcacttgctttcaaataagataccttttggagcccgtgctcagtggctcacgcctgcaatcccagcactttgcgaggccgaggcgggcagatcacttgaggtcaggagtttgagatgagaccagccaacatggtgaaaccccatctctactaaaatacaaaaaagagccaggtgtggtgtctcacacctgtaatcccagctacttgggaaactgaggcacaagaatcccttgaacttgggtggtggaggttgcagtgagccgagatcgcgccactgctctccagcctaggggacagagaaagactctgtctcaaagaaaaagaaaaaaaggatacctattggaatatggccctgttgtttaaaattgtaaaggtaaaaattttcaattcttgtataaaacataagctttatcaagtatagaaaaaaatgcaaaaaaaattatcattaattgtccttctaaaatgtttcactgtgttctatattaaaattctatcatgctccagatttatcacatctggaataaaggctgatttttttatcgactgagctctaaatccttactatcacaagcatctcaataattcatcacagatttaagagcactttcacatttattgatctatctgaccctagcagttacctgtctaggagagtctgtactattatctctatttcactggtgagaaaactaaagcacagcaagattgagtttgttcacagatattacaaagttgggcaacagtagaactgaagtgggaatgcaggaagtttatactttatgtaatgattagcagattgaaagatccaaaaaagatggttctaagacaaaagttgggtggggaaagccacctattgataacgacagtagtagtattcagttttgggatatttgtgcaagacattaacctcaaaggtaaggagcccacctcaaggagctcagagtctgcgaggtataaaacgataaggaagaggaaacctcaagctaccaaggaatgcctgggaatgtgatgaatgctggaaggaacactgttacgctggaatgctccttagaactcctgctctttattttctggtatcccaattgaacagactggtgggagctggagagtacagagtttattaagctgccaaaaaaaaaaaaaaaagacattaaataatatcctgcaaagaataacagcagtgacaacaacaaaaggcttttccagatttattcattagcactttgtatactcacacaaataaataatataggaaactgactgaaatagcgtagagaagaacatgcttcttcgtgttaaaatctcactacactttcagcacaattgcaaaggcagaatttaatgaacaaatcagtcatacttaccttttaaaaataagtcctgcaaaggccacatgttcttaatctggaagtgcaagtatttgctgacgttttatgattaaacaaatacagagttacagtgtcaaatgtttttgaatcaaattataacattaagcttcacatccttgtgaagcagattagattaaatgttaaatctagtcaaacttctgctaaaacaaaatatgaaaagactccaaagggattcggcatctggatatctcactgtaggttgtgtagcacaaattagaaggcatatcttttataatgaatgccctactgaatgaataccattatgaacgagcatgaacttgtagccaaatggatctgaggtcaaatcccagacactcagtactgtggcttctgtgacctcagacaagttacttaacctatctgtcagtttcctcatctgtaacctgcccctttggaagtgacagctaaaaattccttgagttcagacaggagattattacaggatcatttaaatagaagtaagaattatacttttgaaaaaacttccagtagttgtttcataactcatcaaaataggtttatccgccctgtaccatatgttatacagtgaagatataaggtacaccattttatagtatggtgcttcagttcagtttgtagaaatgtgtaaaactgagaaccaagccatacccttggctaaacactattcagtaggactctgccacatttctgcctcataatggatttttgtttttttcaatggtttttgatgtgatttccatttcaacatcagtaagagtaagttgcttatacgttttaactgcatagttgttgataaagtaagagaaaaatcaagaaataagggattttcagagggctcattacacataaaattcatttagcagagaagtgtattatagggtcttaacctgcaataaaataagatgggttgttttctgcctccctctttcataaagccccgttgctgatgcattgtgtggtccatggcacataattgtttccgccttagtggatatacgcctgggaacactctatctcttaacgccaatactgatgggcacagtttaggtttcatattctatccctggctccagtaaattcaagggtcaccatacttaagatttacctcccaggcttgtcagattttcctcagttacctttatccaaatgttcttttagtagccatttttcacttttgaattgaaatagcaactcaaccaaacaaaggaattcagatgagaaatgtccttggcacgtacaacaatatgacatgtgaattaaatgggaggaaaaaatcctccccgttgtggatctgagcatggacgataatggagttgtgatttagtccatgaaaatgttagacgaagtgagctgacctttagcttcacttactgctgagacaaaatgagaatataaataaaaattaacttcttttaccattttgtgagactttgtaattcattggttttacatttatgtgtagaatgtttagctctataaaaatatgcattattgctaaaagctcaagggattcctatacgtaaatagaaactcagagaaacagagttgaagttacatattttttttttctctagagaagaggtttctaatcctaatacagtggttctttaaaaaatatatgtattagccccattttatccaatttcttacacttgtctaacaattttgttatagccattcaggcaatgataggaaccagcatctttgagtgattccagagctgagggatatagtcttccaattgctttgcttcattctttgtaattcaaattaaggccaatattgctaagcaataaataggtaaatccataaatttaaagcacttcgtgtattatctatttatacttgtgcatatggcatcacaaaaatgtatgggcagatgtttacagcgtatgagcaagtaatttctaattcacttttccgcttacactgagatcagtggaaagcactatgcctgccttgctacagaagtgacttagattcaattcattgagtattttctaagagtaagataggtttaagcaatagaatatgttactaaaggatatgtgttcatgctgtcttgtgttggaaacctttaaagaatatacttgaagactaaacatttattcgtaaagatttaatgggtgcctttctacagtgaatacagtaaaatagatgacccttggcagttcttagatttgatgtaagaaccatgatcaagcaaattgtaaacaacgaccaactcttaaataacttgtttcaaattaataatactttcccatacatactcttgtttaacatttgcaattctttaacgggttggtattattattcgacagacatttagccaagtatttcttgaaaaagaatccatctatcttaattgtcttttgtattactcctttgtgagggctatcattaaaaaataacatggactggtggcttaaacaatacaaacactttctcaccattctgggggccagaagttcaagaccaaggtactggcaaggattggtctcttgtgaggcctctctccttggattgcagatgaatgccttgttcctgtatcctcacgtggtctctcctctgtgttgcacatatccctggtgttttgctgtgtccaaatttcctcttctcataaggatacccatcatattggactagagtaaccctaatagactcattgtaacttaatggtctatttataggctctatctccaaatatgggcacattccgatgtagtaggtggggcatagggcttcaacatggatttcatgggacacaattgagcctgtaacatcttctcttaatatttggcatatccagatatttggtacatatttgttatataataaattcatgatcaatgaatgaatgcattgatggctgtcattaactgtaacctagatattagctgaatcataaacttgctccattatttggatataaagaacactttaagtggcattttttaaatagttatgttaaataggttgcctatgtacctaaaagagtgtttaattacagcaatccctccctccctccctccctccctccctcatccatggttttgctctccttggcttcaattactggcagtcaaccacagtcagaaaatattaaatgaaaaattccagaaataaacaattcataaattttaaattgcatgctgttttgagtagcataatgaaatcttgtgctatcccacctctgtctcacccaggactgaatcacccctttgtccagcgtcttcatgctgtcaatgttacccgcccattactcagtacctgtctaggttcttagaaacactgtcatggtatcgcagtgcttgtgttcaagtcaccctagttttacttagtcatggccccaaagtgcaagagtagttatggtggcagttcaaatatgccaaagaaaaactgtgaagggttttctttatgtgaaaaggttcccaacttaataaggcaagaaaaaaatcgcatgctggggttgctcaaaatctgtggtaagagcaagtctatccgtgaaattgcgaagaaagaaaaataaattcataaatactatatatagggttttgtactacctgcagttttaggcatccacctgaggattttgaagcatatcccctatggataaaggagaactactctattagttttttgtgactcatacagtgaacaaaactgcaatattaaatgcatcccattagtacatctcagaatttcaataaatttgaaaatgttatacaacctggaataggggatctttatttggatttgtattcccactaaaattaataaattatacatttccacctatggggttacaagcttaaaatgctgcttcagtggatactatatgtcttgtagcactagagagaagatgctatatatacttgaaagtcttttttgtttatgaatatgatgctatagcttgagtttgtcccttcttcccttgactgtcttcttcactggagttgatgggctacaataaatttcccacattttgactttgtagatctgcatcatcacgtcaggtagatggtgtagtttatacttaagagataagattttctccatttgaagcttttttctcccacaactaatctattaaccattttgttacgtgccattttacctgacatgcactgacagggtcactaggaagttagctaaaaaaatgcaagtatgttttagaaaaaacctatatatactgcttcgtaataattagatggttgaagtgactaaattcattgatttaagctcgcacatttcctgtgggtatctcgcatcactgtttgagcgctatggcttttattgtaaacataattcaaaataagttgagtagaaagtgaaactacaaaaaattaacagttacattatgctgaaagcaataacattgatatttatgaagaaaaactgaaaactcacttatgattgagctgcatataagtacatgattatgttaatactgtaggaaaatgttgactgccttctgtttacccatgcgtgtatttttttttaagtggtgatagattaaacaatttaagaaacgtgactctcctagtcacttagaaataggtggattagggccaggtgcagtggctcatgcctgtaatcccatcactttgggaggctgaggcaggtggatcacctgaggtcaggagttcgagagcagcctggccaagatggcgaaaccccgtgtctactaaaaatacaaaaattagccagacatggtggtggatgcctgtaatctcagctactggggaggctgaggcaggagaattccctgaatccaggaggtggaggttgcagtgagctgagatagtgccattgcactccagcctgggtgacaggagcaaaactctgtctacaaaaaaaaaaaaaataggtggattattttcatgatgctaatttcatttgcattgtttaaatcatgtgttaatatcctctaggtgggttaatacacatatgtagtataaagtaacatagaaattatgagaccttagacactgagtagatttttcaaaaatatgagttataaacatttttctaactctaattctatataaaataaagcacgtcaatattttatgatttctagctttaaaggtccaatatatatatgagaaaataagtttcttatttatatgaaaaagttacaaaaagttgaaaattcaggctataaagtgcatcataatgaggttgagctaactgccattttgaaatgcttcctttgcatagaaagcatcacaatatttgttttccttccaaaaatcattgatagttggtttatgttacatattaaaatagtgtgtgttcttagacattagtgacatgttaatgatatagtagtttttactcagagattgttagttttctcactagagtagtttagaaacagaaaattttaatacttttgtaataattgagaaaattgaaaaatctacatagtaatagaatttaagttactaagaattttcttctacaatccaaatggtaggcaattctcattatgcaagattgtttcaattaagagtcttttgaggcattctatttagtagttagacttttattctttagggtgtattttcaaacctaaggaaaatacaccttttacttgttctcactgcaaaatcctctctatatgtatgtctttgttatcttacatttgctatggagccattttatatagtggtataataaccacttcatattgcttgtctctttgcttttctatgaaaggtacaagacttggtgagataaagacaaatgacagtcacaccacttatttaaatgtaagcagatcagaaagagtgtcccttccaacttctagcgtacataggagactgagatactttggcaaattattcatgccatttttaataaaacgtagttaccaattgtttgctgatgctgtgcttgattgtctcttctccaggtattgggagatcgatgggcaaacatctgtagatggacagaagaccgctgggttcttttacaagacatccttctcaaatggcaacgtcttactgaagaacaggtgtgtcatgtgtgagaaactagctgtaaaagacacggggggatattaaattggaaaagtaaagatttatgtttatttattccttggaattctttaatgtcttgcagtgcctttttagtgcatggctttcagaaaaagaagatgcagtgaacaagattcacacaactggctttaaagatcaaaatgaaatgttatcaagtcttcaaaaactggccgtatgtactttctagctttcaatggtcttataaaaacccagtactgtatattatcactattatttagtctcttctatgctattgaatattaaatgtttatttttgcttggatcatagattattcaaagatgttatattgctacttttctgaattaaagtgggaaaaaactataggtggattttcaactttgtttttcaaagttgtactcttgataaaacatagcataccagaataagacttcaattaaaattaataaagtaatactaagaaatgtctgtgagcctttcataaagttctaagcagcatagttctaaaaaaatagactgacgttgattctcagaataatatgtgagagttacaagcgacggttatcctgacattgatggagtttaaccttagtttattataaaggggtacctgagactgggactgggtaacttatgaaataaagaggtttaactggctcatggttctgcaggctgtacaagaagcatgacaccagcatctgctcctggtaagtgcctcaggaagcttacaatcatggcagaaggagaaggggagccagtgtatatcacattgcaagagtggaaacaaaagagataagaggaaggtcccagactcttttaaacaaccagatttcatgtgaactaactgaatgggaactgactcatcatgaaagggattgtgctaagccattcatgagacatccgccctcatgagccaatcacctcccaccaggccctacctccaatgctgggaatcacatttcaacatgagatttggagaacagagatccaaacaatatcacctagtttttcaagcaaaaaaaaattaaagcctatcaaatgacattgattataaatacctcgagtgttttgagaatgagatttctttggcaataaatggatttcagaaaagacttcattgaagcatttggtttcagcaggaatttccaagatttaaaaaaaaaaaaaaaaactctaaagtttctcttactctgtgaattttatcatttctagtaaaagaggccggtctgatactatgagtttaatttttcacgtgacatattctactttatgatttcttaaaatttttgatagatttgattaaatgttcatttgatatgaacttttataaaacaaaatggttgtaagtagtgttccataatttcacctttattattgcattgtacttcataataatgcaataatttctaaacttaagtaaatttttccactcattttaaatacgtaccattttaccagctatttatttgtttcatacattttttttgctccataaatgctaaccctcattggtcttttaatttaaaatagattcacttatgtattacttgttattacaagctagcttattattgataagaaattattgctcaaagaatatggactttattaagtgatgtgactgccgaaaatagagttcagaaaagtaacctgtatatgtttgaaaacacgagtgcaaaaatatcagctgtatttgtagttttggcctgcagctgatggggagccattgagagtttgcaaaagaatcatatttgcatttttgtaattctttttggtaggaagatgtttgatggtacgaggactaatcagaagacctgaactaagtagcattgggcattaagataagaagagaaacattagaatgttaagatgtgatgaatgaaacttgtgataagaggcagaagtttgaaatggttcctagacatttcatttgggtgactgggttcctaggagggttattagccctaacaggagaatagaagaggaattgctggaatgacaaaaatgataattatttcagatttggatatattccgtgtaaaatgtctttgagacatccaagttaaaaatcctttccattaatcagttggtttacacaactagaatctcagaaaatggttcatgactagttattgattcagaagcaatcaaaatgcttctgagggattgtgtagagtgacacattaagtgaaacgaatagatttcagggaggaatgtctacaatcaaggagtaggcagaggataagatgttgaccaaaagattgagcagataccacaaggggaaagtggtatcacaaaagtgaggagaataaagatttcaaaaaagtaggaagtggtacacactgtcacatgccacagagaggagaggataaattcatgagggattctatcatatctagaggaatggatgcatggattacatctccttaaagcagaatattccttacaaacattgttcttctcaggcaaaatgtgaatcctttcagtaaataagtgagtgaccactgattatcaaaatgcagtcatgccctctgattaggagcgaagatatattgctagttaaatacagaatcatgtgcttcagacggtcaatcataatggtgatggtcagtcatattctgtgtgctgaaaaagtcacaagcctgcccagattcaaggaaaagggaattagatttcatttcctcatggagaaacaccaaggtcaagttatagcaaagcatctgagatgaggatattttacagccatctttggaaagtaccacatgccagaatagtacagttattttacatgatgataaattccaaatcttaatatctagtcaaagttcctgcatatattgttgactagatttaccaatcaagaaagttgttcttaggaagccacaaactgacaaaatccaaatatgttaaagctagatgagattttgcatctcatctagtgtttcttcaatctcattacacatgtaaagttcattaggaccatctactcagtttgtttccaagagaaaatcgagatcaagaaaaaacacaggatctgtatcctacaacattagtatcagacttaaaatgaacactaagacatccagactcaggtccaggcctttcaatctatttcagtagtcctcatatcagttgattccttggaaaaaataactgcaactgagaactgtcatttctaacaataatgtgcctctatgttaacatttttgtgagcagaaatcttggctagcctcagggccataaaaatgctcttttaagaaagtcaataattttccaataggattaaaatttgtgttatgtcaccttgcttgtgaacaaagagaaaatatgttttctataggtcttgtcatttgatagtttaagccaattaacaaaacctgacagctggtctagaatttgaggtaaaattcctttgctgactcaggcagtgaataagaatttaatgttcattaaaatatgtcacaatctgagacccaaaacaggtaccatctgtcaccagttttcactacatgtctaggtatagatacactgtgctaaactctcttctctttacaataagtgtaatttgtttcaaaatagtatcactgataacccatgggattgtgtcctgcttgccattgaggtgggaggtggggattatgacatttaatttgctctagatctttgggattcatatccaaatcatgtagatctattattttttataatcaaaactgatttaagttttaaactgatttggcatcagggataaaaatgaagggaaagaagaaacagtagcttttatgaggtgaattataagacttgtagaatcacgtaaattatcgtgggaagatccaagtcaagaagaaacctgttcctgagtaaatgtatttctgctgtggggactgttggcgtttgctggggaaggacagctctggggaagcagggtgatccaagagattatggtatataagggctacagaagtacttaggaattgaagatattctcaaatggctgtgggatcaaaggacatggatgaagtgctcatggtaactgagcaagttcctgtttgacttgctacctttacctcaactcctgggatggccctcaaataattaattcagacaggatcaatgcttctcaaaatgtgttcccccgaccggcagcatcagtatcaaggaaatttgttaggaatgcacattgttaggccatcttcagacctactgatttagaaactctggaagtggagcctagtcatctgcattctaacaagcctttcaggtaattctgatgttctttcaagatgagaacctctgtaatagatcaacctcccaaagtacaactggtgattagaatgaattggagcacatcttacatgtagataagtaactacacataatataggtggaaaactcaattttgccaatataggagaaattgtcttggcattattctcttatgcgtattcctgatgagagtgaggtgaaggtttcctgggccttttgtaaggatacattatcttttcacttcaaatcatcttgaacagcttatctgtctcttctccatatccactactgacccagtctgatttattgactgtaccttcctccctaccttggaggtaggtctacattcctggcttctataaaaataaagtctgtttattcttttactatcccagctggcctttgccttgtacacattctctagatcttccttttgccacctgaattttctagagctctatgggtctctggcactcatagacctatggttaattattgatatgtagaaatacatattttatgcaataattagtaacaaatcatagttatttaatatgcacatgtaagacctaagcttaaaagaatcagcatcaatggatagacaggacaaggtaattctaatgaattctatgatctaatgtatctggccccatcatggattttctttcttttcctccctcagttaataatcctgggggagttctggaactgggagatgactactgaaagacagaaaaagagagagaaactgagaccaaacaactaatctgccatcatcatttttgatactcatatctaaaatttactaggtataagtctgggttcagtgtttttgtcatacagacatataaaaattcatttattcaataatcacacaatgtaattataacattgattttactttaccttgagtgcacttttttcctaattggatttttttttttttcttgagatggagtcttgctctgttgcccaggctggagtgcagtggtgtgatctcggctcagggcaacctctgcctccctggttccagcgattccttgcctcagcttcctgagtcgctgggaccacaggcatgcaccaacattcccagctaattattgtatttttagtacagacgaggtttcactatgttggccaggctgatctggaactcctgacctcgtgatccgcccgcctcagcctcccaaagtgctgagattataggcgtgagccaccacctctaattttatttttaatggtgactttcactttcatttttgtaatgcttaccaaatgtttcttcatgtggcttaataataaaacaggaggcttattttcatttgtttaggtaccatgaggttactcataggtttttattgcaatcctcttctttaaacataattctcacactcctcttctgacatgtttccaaatcattacatattttgtttaaataatgggtagaccattcagccttacacatatggctatttaaaatagtttctaacattctgagtaagtaagtcaaagaggattgtacttagattttttttttatttttagatttgtgtctttgtgtatattgtgcctctttccatagtaaagaaaaaaaatgacactataactggaggaatatacattgaaattcaaatatggctctcagcttgggacaggtagcatcaacctttgttctagtactaatgcaaatattcacttaaatttaatggaaaactaacaagtgaattaaacaaaatgaatatgcaaaacctatctattgggctgggtatggtggctcatgcctgtaatcccagcactttgggaggccaaggcgggtggatcacttgaggtcaggagattgagaccagccaggccaacatgttgagactcctgtctcttctaaaaatttaaaaattagctgggcttagtggcatgtgcctataataccagctactcgtgaggctgacaggagaattgcttgaacctgggagacagaggctgcagtgagcagagatcatgccactgcactccagcctgggcgacagagttagactccaactcaaaacaaaaaagaaaaaccacctacctattgctaaacccccacaccgtgagttttattttgatttgaattcagtgtataatatcttaatttgtattttggtctattgcattctttcaaacttagaaaaatactgaacttattgttaaggaaaaattagagatgaaacttaaatcttgctttgtttccccttaaaaatggcatgaagactgaactataacatactccaggtgaagcagattctgagtaaaagacaaactaattgaaggagccactagagcattctgcagttcagagctatcaatgcaggtgccatgccaaaatgggctacttagattgtccttttcaggaaggtgtattgactgctctaggtttggggcactttgcttcatgggcaattggtgcatttgtgtcatgacaatttgctctgtggtatgttagttcttaaataaacttacatttgtttcggaaagacaggtatcgcgatttagtttacattcattgtatttgctgccaaatatggggttgttaagtggctgtaagataattttctcctttatttctcttccttcttctcctttgtttacagattaagtcagggagtaatgttcagtacccaggaattgaatttgtctgtgtatcaggcaaagttactgagtcaagtaaaagaaaaactgccctgatttactgatttcacataaaccacttattcctttcaaatcaaccaaagggagtttgtaaccctccacagctcacaggaactttggaaatataaatggtataaaaattgcttcataagacacataagtatttataaactctgaaaagagatgctgaagcatttatgtcatgcccagcgacttagttcttttacttaatgggctctacaattagttttaaaaaataattactcaaataaccagatgttaattgattaatggatgctacaaaaattttatggtcagtaaatcacataatgagattttatctccaaataatgaaccgaatgttaaaactgtggaaacaataatattgtaattttatccaaataatcacagcatttcagaatggcaagtttccttagccattctcattttctcagctcactagcttttcttcagtactcctggtacctgattgtcagttttcgtttgaattccgtcaggaattaaggggaaatccaagatccgtgccttctaatttccacatgttgatctctgttttgccttttgaagcaatattaccttttcacttggattttcttcaaatatttcaaggtagctcttaattacctctagtaggtctttattctacgtttgagtttcttttctcttcttttctcttcaaacttcttgggataattagatagattataactttctacctctatttttctgaacttttgatcctttgcgggcacgattgaaatattttcttatctatgcaaatgagcaaatacacgcaaaagcagattgaactatagtggtgtatggaatgcaacccaggcttattctgtgatctttcttgttttaacaggttttaaaagcggatctagaaaagaaaaagcaatccatgggcaaactgtattcactcaaacaagatcttctttcaacactgaagaataagtcagtgacccagaagacggaagcatggctggataactttgcccggtgttgggataatttagtccaaaaacttgaaaagagtacagcacaggttagtgataccaattatcatgctacagactatctcagagattttttaaacctgcattaagagagtgacattataaccctacaaaagaagcaaccagattagtttttgccctgtgtttagttaaataaaaacatgattcttttgcctgtcttgttgttggagaatggtggtgaggtagagtgctaattaactgaacttgttactgccctagagtgaatttcttccagcccaatagtaacggggaactgagtgacttagagcaggcgaacaaaatgctgggaactgtataatcacagtctaaccccaaatcagagattgctagaaccacgaggaacattagccaactccgttttactcttgagaaaaatgaaacttagggaagaaaagtaaatttttcaagagaagttagtggtaggagaactagggttcaggtcttttgatttcttggaaagttttttattagtgtagttaattatctgactattgtaccttttctgccatagactgctgatttcataaaattatgaatgtggcttagttatactaacacatacgggctgtagattatgaaaacatctcagctacatttggggtatgtggttttattataataatttttaaagatttagtcactaaaatggggtatcgttaaaagttgaacctctttttgtcttatgtagttggatggtagaataatgagtagtcattcaagatataaacattatatataatagtatttaacatattctgccacatagcctggcattataaggaataactttactcaaaattcatagctcaatgcacaggcatacacttccatattcaatagattttaggcaaatatttcctctatattgagacaagtacatggaatttgttttcttgagacctgacatctgataagtagcacttaggaaatgccttttggagacatgaagtttgtagtattgcctccaggaatacaatttaagacagcgtaataaaccagcctatatgattttcaatcacagttcaatgttacttttaatccaattttacgttaaaaaattataatttgaagaaatatgaatataaattgtaataatttcccacacaatcattacataataaaaactccatttgttttccattaaacatactttagcaattaattgacctaatagtagttttagtactatattatgattcctcctgttttatgtgatctgcccatggcttctttgcaatacattggtatttatgtaataaatacatgagacattagtcaatttgatactttttaacccaacactgagagtattcccatatgtacccattgcttccacagattattgctgccataaaatggtcagttgccgtgttaagaaagattgccattatttgataaagaaagttattttgacgtgcatcccttttaagggacatgtttagggagctgtaacagttaactgtaggtcatcttctagttcatttgcattgcatggagtggttctcaaacttgagtctgcatagtagccacctgaggagctaattaaaatgcatattcctaaacattttgctcagaaaatctcatccataagctgtgataaggacctaaaaatctacatctttactaagcctttgatacaatctgcagaccatagaggggatcaacatacactgggatctacttgaggtgggagggtgggaggaagtagatgagcagtaaataagactattggatactgggcttaatacctgggtgatgaaataattggtaagcaaacccctgtgacacacatttacctatgtaacaaaccttcatatgtactcctgagcctaaaataaatgtttaaagaaaatagacagtgatatgtgtgtgaatcccaacattctggttttccacaatgctccctgaaatgtgaaaagggagagcttcttgggaatacactatataaatatgctcattcccttggaatgggactactttttgatgaagtttgtacatgtcatcgaaatattactgatttgattattccaattggtagaaaagcatttgaagccttatttttaattccctagaaattatgagaccaccacctaggcaattgacgtgatgtcttccaacttgtataattctataataaaagaatactggttttgatttgcatggttctttatgaaataaagtccaacatgcattacagcatgtatctcttcacttgctcatagggatacaatgaagataaaatggaggcatagacaagaaagcatttgaggggaaaaaggttgagtttgatatgtaagtcatgtagttcagtgtgtctggagggctttttgtggttctctatctgcttttttttttttttttttttttgagatggagtctcactgtgtcacccaggctggagtgcagtggcacaatctcagctcactgcaagctctgcctcctgggttcacaccgttctcctgcctcagcctcccaagtagcagctgggactacaggtgcctaccatgacaccccactaattttttgtaattttagtagagatggggtttcaccatgttggccagggtggtctcgatctcctgaccttgtgatcctcccacttcggcctcccaaagtgctgagattacagacataagtcaccgcgcccggcccactatctccttttaattttattttcaaacagttacacgctcctattgtgggctagaaataaataaaaggacttaacatcatgtaagttgttttccagaacactaagcttgagtttttcttaagcttatgtttcagttttctctcattgcctttccaaaaattatgctgtcatgggattgatccaaatctttgctggctgtttttgagctcacaggaaggtagaaatggagctactcaggaaaagagaaattaaaaggaggtaaacagagacaacagcgaaatagtatcatataagagcaactgattttcttttatccatgttaaattgaccttgattaaaattacataaggagaattccaagaatatgagctgtaaggttgtgactttgaagaacaaagctcacttgtatgtacattttctataatgattgtgggagaaaaatgagtttcattaatgactactcacatgatatactcaattgtttcaaaaattcttttaaataattagtataaagaatgagcaaagttctcataatggttaaaacctattgtgaggcagggtgtggaaatcgtgattgagatgacaaggcacccagttgtactcatataaagaacactgcttgcgcgtatgattgctgttcaggtcagagctttgaggcatttttgaccttttgaagcagttgcatggcaagagatcaaaacgtgaaaaaataatcagctaggaggactgctctcttgcatttcaaactcagatttgacttgaataatacctggacacaagctgagggtatttaagttgattagaaggtagcctaagaagatagaaaatactttttttctaaatgttggagagataataactcttgctatctggaggcttacaatgagaaaagagggcaaatataccctggattgacttctttaaaaactcaaatgatcatgattccctgtaattttttataaacatacttgtaatttgtgcagttttttctaattgccttggccctgatcgatatatattttatcttgatcataattatgaaatacgatagtgacgaattccatcaacatttgcttgtctggaaaagattttattcttccttcacttatgaagcttactttgtctggatatgaaattctgccttggaaattcttttctttcacggtgttgaatattagcccccaatctctactggcttatagggtttctgctgagagatctgctgttaccctgatgggcttccctttgtaggtaacctggcctttctctctggctgtccttaacattttttctttcatttaaacctggagaattgtatgattacgtatgttggggttggtctgctcagtatcttgcattccctgaatttgaatgttgggctggcttctgctcagtgagtatcttgtatttcctgaatttgaatgtttggctggctttctagattggagaagttctcctggatgatatcctgaagtgtgatttccaacttggttccgttctccccgtctctttcaggttccccaaacagtctttgcttcagaatttacataatcccacatttgtcagacgttttgtacattcatttttattcttttctttttctctaatcttttctgcctgtcttatttcagcaagatagtcttcaagctctgagattctttcctctgcttggtctattcaggtattgacaatgtgatttcattgtggagttgtcgtattgcgtttctcagctctatcaggtcattcatgttcctctgtaaactggttattctggttatccgctcctgttacgttttatcgtggttgttagcttgtttgcattgggttagaacattctcctctagctcagggaagtttgttattatccacctttgaagcctacttctctcaattcatccatattagcctcagcacaccatctcacgccagacagaatggtgatttttaaaaagtcaagatacaacagacgctggcatggtttcagagaaatgggaatgcttttacactgttggtgggaatgtaaattagtttatccattgtggaagacagtgtggtggttcctcaaagaactagaaccagaaatacccagcaaggccgttactggatatatacccaaaggaatataaatcatcctattataaagatacatgcatttgtatgttaattgcagcactattcacaatagcaaagacatagaatcaacccaaatgcccatcaatgatagactggataaagaaaatgtgatacatatacaccatggaatagtatgcagccataaaaaggaatgagagtatgtcctttgcagagacatggatgtagctggaagctgttattctcagcaaactaatgcgggaacagaaaaccaaacactgcatgttctcacttataagtaggagctgaacaatgggaacacatgggcacagggaagagaacaacacacactggggcctgttgctgggagaggaggagagcatcaggaaaaatagctaacggatgctgggctcaatatctacctaatgggtctgtaggtgcaccataccaccgtggcacacatttacctccataacaaacctacacatccaatacgtgtaccctggaacttaaaaaaataaatgtgatagtaagaaatttattataattaatattttaaaatataatgtatgtgatttgaagcattactttcctcatttgactgaaatcacatgtgctgttgaaagggtatattagtcatatgctttacaatttggtatgctaattgtaattatcatattacgccataaattgtaattactgtatttaatatgtaatttatattaagtagtatataccaggtgctttggtgtaagcatatatatatatattttttttttcaagcgagtctaaaggttttgtagttttgtggatttttagtagaataaattgtcttctttctcaggaataaggaaagttgtatgacttattaaggttcaaatatctcattcccattttgtgaatattttgctatattgctaacaacaatttttgcaacattctcaactgtgagcacctctttaagataaaatacatatgctcagaatttgcctcttcttgtacatggcagttcatgtttatgctgtatatgtttgtgcctacattcaaggatgcccaaaaagagaaaatgattattatataattatgtgtaccttctatatcatctatatcctgatgagagatttattatgtgtgctgccgaagcaagcacctgatgggagatttaaaactcctatcaaatagtaatataaaacatagctgtaaatgataagccagtgctttttattatacccaaaatgcaaatagaaatatgccaatgtaccaagatgaaaatttctttacatgttcttcttttctgagttaattctcattctttaaagatcctctattttaacccttcataaaatattttatgttcacgttctggctgtacccattctcagagcatcattttgtagacctctttgtacaagggggatatagttgcaaatggtttgcctctcttcttttttggccagtaagtttaattaaaaatactctaaggctttttatttaaaagaccttttcattgcttcctgaaagctctccacgactagtaagcctgatgccaattaaaaaagaaaataattttttaaaatctggaattaaaataaaaataccttacttattttgtgtttccttcttacttaaggtcatagaattaactcccttaaatttgagaacatgttttgggtaattcctcaggttaaagttttattagaaaaatttgaagttgaccgagtgtggtggctcacacttgtaatcccagtactttgggaggacaaggcaggcaaatcatctgaggtcaggagtttgaaaccagcctggtcaacatggtgaaaccccatctttactaaaaatacaaaaaaagtagccaggcatggtggcaggcgcttgtaattgcagctacttgggaggctgaggcaggagaattgcttgaacccgggaggtggaggttgcagtgagccgagatcatgccactgcactccagccgggatgacagagcgagacttcgtctcaaaaaaaaaaaaaaaaaaaaaaaaaaaaaagaaaatttgaagttacatctcaaataactttggaaattaactgtatcattttgctatctccaactataataggtatttgagaatgggccttgtatatcagtgcaataggttttaccttgtaaatgcattgtctgtaacaatataaaatgtaagcactaaaaaatttaatacattcagtctgagttaactcttggaatctctcattctttatttataaatttaaaggaaaggtaagctaggcagatttctatagtggccatcgagttctaaatgtctttgatatgtttctctttgcttttatgtgaaactctggagtacttagtgaagaagattcctacttttgccactggaaaggcagctaaaaaataatgataataacatcctatccctattcaaaggagacttaattatgaaattattacactgtattcactgagtatgtcattaaaataccatacagacaaaatgctcagcatctgtatgatacgcctattatctcctgacaaaaaaatgaaataacacataaagacaaatacaagtctttttcctaagcctatacttgataatatccatccctaattatagaatgtgtttcattacttcagtgttagatggtatgtagaggaaggccagatggatcagaaaaattaaatctcattgctttgcaatttttgcaggtgcagttaattcacacagttgctcaaattccgtatttaatatgaatccagaagacaacatacatctcttctttctgatacaatttgtactaaagacaatttaaaatgaggaacaaaatacattaaattggacagacagttttacagaataaaccttcttaattatcatataatatttatttcgaagaaacaaatgacttatgatgccttctaagtatttgacaataattttgctcatgatttcaatgtcagtacttattcaagaaattttattaccttacagtaataaattaattattaatataaattaaattattattaaattattgtaataataaattaattacagtaattaatagtaaattttagttaccaggctactgtcctgaactttggcactcattgtatgctacattcagctatgggaagtcctctatacttcataagataaagcattttacatccttgtgattagtaactcagcttcctttgtgaccatctgatcttttgcccaaggattctcccaaagttcaacatataaatattttcttttgcttagagatgcaaatctttaccagatttttgtgccttgtgctaccatgcctgtggagttggtttttaagcatggctatcaattattatctaaagctgttgctatgattatgcagtatgttttaaactgcagaagtgcaattcctccatgcccattaaaacttattgatcactccaaagggttacatatacatagacagacaacgcaatgaaaagccttgatccacagttgtcaacctgattgtgtgtgtgtagtgtattttgactaattttgcacagatttcaatatagcatgtcaagagccaaacatatttaacattgagtaattcttcctatataatagttatgatgtgccattgtttacaatttcagtattctgaatttatatatgtgtgtgtatgcatacaaatacacaccccttaaaaggaaaccaccattcaaaaaagtgtacaagtgtaggagcaagtgagcatagctgataagagttggatgaatgaacattcagacttggatttatatctatgctttgctactaaaaagttttatctgcctcaacaaggtcactttcatctataaaataggaataatattagtacttactcttagggccattgtgaggtcataatagctaccatttattaaagctttacaacatagcaagggagtttttctagatcttttgaataagataatcaattcaaaacacttattgtaatgcctggatcatgcagaaagcttcataactggtacctgttattgcaagtattagtatttgcaaaataaagattttatgctaaattagtaactaatactttatagcttgaatctttctagtaagtatctaaatattcaaatactagaatatctcaaaaggcaagaagttgaaatctcttatcccagcataacaaaaaagttacaaaggcaataatatgtaaataattaaatggaaagttaaaagtttcaattaagaatatcagtcaaaaataaaaggaaaatttattagcctgttcttacactgctataaagacatacctgaaactgagtgatttatgaagaaaagaagtttgactcgttcgtgtttgtggcattatagtattccttggtgtaaatgtaccacattttctttatcttgtctatcattgatgagcattaaggttgattccatgtctttgctattgtgtatagtgttgcaatgatacacatgcatgtatctttataatagaatgatttatatttgggtatatacccagtaatgggattgctggcttaaatggtttttctgcctctaagtctttgagaaatctccgcattgtcttccacaagggttgaactaatttacactcccaccaagagtgtaaaagtgttcccttttctccacaacctcaccagcatctattgttctttgactttttaatagtaaccattctgactggcgtgagatgttatctcattgtggttttgatgtgcatttctctcatgatcaatgatgttgagttttctttcatatcgttttaggtcacatgtatgtcttcttttgagaagtgtttgtttatgtgctttgcccactttttaatgaggttatttgtttttttcttgtaaatttgtttaagttccttgtagactctggaccattgtcagatggatagatggcaaaacttttctcccattctgtaggctgtttatttactctgacggtagtttattttgctgtgcagaagttctttagtttaattagatcccctttgtcagtttttgcttttgttgcagttgcttttgccattttcctcatgaaacctttgcccatgcctatgtcctgaatcttattacctaggttttcttctaaggtttttattgtttggggttttgcatttaagtctttaatccatcttgagttaatttttgtatagattgtaaggaagaagtccactttcaattttctgcataggactatcccagcactatgtattaaataggcagtcctttccccattgcttgttttttcaggtttgtcgaagatcagatggttgtaggtgcgtggtcttatttctgagttctctattctgtttcattggtctatgtgtctgttcttgtaccagtaccctgcttttctggtgactgtaaccttgtagtatagtttgaagtcttagcttttgggctgagacaatgggggttttctggatataggttcatgtcatctgaatacaaaaataatttgacttcctctcttcctatgtgaataccctttatttctttctcttccctgattgccctggtcagaacttccaatactatgttgaaaaggagtggtgagagatggcatccttatcttgggccagttttcagggggaatgcttctagcttttgcccatttggatgtgggtttataatttatggctcttattattttgaggtatgttccttcgatacctagtttattgagaatttttaacatgaagggatgttgaattttattaaataccttttggttgtctattgagatagtcatgtggtttttgtctttagttctgtttatgtgatgaatcacatgtattgatttgcatgtgttaaactaaccttgcatgctagggatgaagcaaacttgattgtggtggataagctttttgatatgctactggatttggtttgctggtattgagaattgttgcatcagtgttcatcaatgatattagcctgaagtttgcttttctttctttctctctttctttctctctctctctctctctttctttctctctccctctctctctctttctttctttctttctttctttctttctttctttctttctttctttctttctttctttcttctttccttctctctctctctctctctctctctctctctctctctctccctccccctccctccctccctccctccctcccaggttttggcatcagggtgatgctgacctcataatataagtttgggagaaatcccttcttttcaatttttttggaatagtttcagtggaaatgataccagctcttctttgtaccgctagtagaattcagctatgattccatctggacctgggcttttgttggttggtgggatatttattattgcctcaatttcagaacgcattattgatctattcagcaattcatttcctttatggttcagtcttagaggggagaaatgtgttcaataatttatccatttcctctaggttttctagtttatgtgcatagaggtgtttatagtattccctgatggttgtttgtatttctgtagaattattggtgatattcctcttcaaatttttcattgtgtttatttgattcttctctcttttcttccttattagtctaactagaagtctaccttttttatttttatttttttccaaaaaccagctcctggattcatttagttttttggagggtttttcatgtctttatctccttcagttcagctctgatcttggttatttcttgtttgtttgctcttggtttgctagtttttttatttgagatgttaggctgttaagatctttctagctatttgatgtgagcatttagtgctataaatttccctcttaacactgctttagctgcgtcccagagattctgataaattgtctctttgttctcattagtttcaaagaactgcagaggtggcagctggtcttcctcccagaagctctgtcccagggagagatcagagctctatccattgaatcctgggtggaatggctgaagccccctcagggaggtcccacccagtgaggaggatggatcagggtcccacttaaagaagcagactggccacgatctggcaagggttgccacacactttcaaacaaacaaatctcatgagaactcttatcaggagagcagcaagggggaggtccacacccatgattcagtcccctcccaccaggcccttcctccaacactgaagacagaattcaacatgaggatttgggtggggacagagagccaaaccatatcataaaataacagcataaacaaaatgaatttaaaattaaagaatagctgaatagttcgtaattgcaactacagtcatatgctgcataacaacatttcagtcaacaatgaaccacatatatgacagtggtctcataatattattatactatattattttttacttttatttttgcttcagaggtacatgtggtggtttgtcatatagataaattgcatgtcacaggggtttgttgtacagattatttcatcacccaggtaataagcatagtacccaataagtagtttttttaatcctcaccctcctcttaccctccagcctcacatagaccaccgtgtctgttgtccccttctttgagtccgtgtgttctcaatgtttatctcccacttagaagtgagaaaatgtgatattttgtgttattgtgttagtttgcttaggataatggcctccagctccatccatgtttgctgcaaagaacacaatctcttttttcatggctgcatagaattccacagtgtatatgtaccacattttccttatccagtctaccactgatgggcatttaggctgattccatgtgtttgctattgtgaataatgcttcaataaaacatacatgtgcatgtgtctttagggttgagggatttatattcttcttggtatacccaataattgttattgctgggtcgaatggtaattctggttttcgttgtttgggaaatcaccaaactgctttccacggtggctgaactaatttacactaatatcagcagtgcaataaacgttcccttttctgtgcaaccttgccagcatctgtgattttttgacttcttaataatagccattctcactggtgtcaaatggtatcttattgtggttttgatctgcacttctctaatgattattgatgttcagcattttttcatatgaatgttttctgtatgtatgtctttttctggaaagggttcatgtcctttgcccactttttaatggtgatgtttggtttttgcttgtaaatttaagttccttgtagattccagatattagacccttgtcagatggaaagtttgcaaaatttttctcccattctgcaggttgtctgtttactctgttgatagtttcttttgttgtgtagaagttctttagtttaattaggtcccagttttcaatttttgtttttgtttcaattgtttttggtgtctttgttatgaagtctttgcagtttcaatgtccagagtggcattacctgggttatcttcttaggtttttatagttgttggttttagatttaagtctttaatccacctcgggttaatttttgtatatggtgtaaggaaggggtccaatgaataggcagtccttttcccattgcttgtttttgttgatttcattgaagaacagatggttgtaggtgtgcagccttatttctcgactctctattcttttccattggtttatgtgtctgttttttgtaccatgctgttttggttactatatccttgtagtatagtttgcagtcaggcaatgggatggttccagcttttttctttttgcttaggattaccttggctattctggctcttttagtggctccaactgaatttttaaatagtctttttcttattcagtgaagaatgttattggtagttttttgggaatagcattgaattaaaaagtgctttaggcattatggccattctgtcaatattgattcttccatgagcatagaatatttttccattttttgtgtgttatctctgagttacttgagcaatattttgtaattctcagtttagcagtgtttcacctccttgcttagctgtattcctaggtatcttatttctttttgacaattatgaatgggactgtgttcttcatttggccttagcttaaatgttgttggtgtgtaggaacactagtgatatttatacattgattttggatgctgaaactttgctgaggttgtgtatcagatcaatgagcttttgggcagagactatggccaaagtatagaacctcatcgtctgcaaacagggataatttgacttcctctcttcctatttggattgcctttatttctctttcctgattgctttggctaggatttctagtactatgttcaatgagatttgtaagagagggcccccttgtcttatgccagttttcaagcacaatgcttctggcttttgcacattcagtataatgttggctgtggactttttaaagatggttctaattactttgaaatatgttccttcagtgcctagtttgtcgaggatttttaacatgaaagggtgttgaattttataggatgccttttctatatctactgaaatgatcatgtggtttttgattttttgttctgtttatgtggtgaatcacatttattgacttgtgtatgttgaatcaacctcgcaaccctgggatagaagctccttgatcatggtggattagctttttgatgtgctgctggattgggtttgctggtattctgttgactatttttgcatctatgttcattagggacattggcctgaagttttcttttttggttgttgtgtgtctgccaggttttggtatcaggacaatgcttccctcatagaatgagttaggaaggagccgctcctcaatttttgggagtggtttcataggaatgataccagcttttccttctatatctgttagtattcaggtgtgaatctgtctggtcctgggctttttctggttggtgggctttttgttcctaatttaatttcggaactcattattggtctgttcaatgattccatttcttcctggttcaaacttggaaagttgtaagtttctagcaatttatccattgcttctaggttttctagcttgtgtgcataggggtgttcattatgaatagtctctaagggttttctctatttctgtggggtcaatggtaacatcccctttgtcattttttattgtgtttatttgagtcttctctctttttttctttattattctaggtagtggtctatctttattattaattatttcaaagaaacagctcctagattcattgaccttttctgtgcttttttgcatctcattttccttcagttcagctccgattttggttatttcctgtcttctagctttggggttagtttgctattgtttctcgttccttgtgatgttcgttttgtaattagagatccttctaactttttgatatgggtgtttcgtgccataagcttgcctcttaacgctgctttgtgtgtgtcccagagattctggtatgttacatctttttaaattttcattagtttcaaataatttcttgatttctgccttaattttattgtttacccagaggtcattcaggagcagtttgtttgatttccattttaatgtatggttttgagcaatttgcttaacattgatttctatttttattgcactgtggtccaagagtgttgttggtataattttgtgggttttaaaaaaattttctaaagattgttttatgcccaactctctatatcatatttttattgtacctttcgatatgtttggatacacaaatacttaccattgtgcctacactattcagtatagtcacatgctgtacaggtttgtagctaggagcaataagctgtaccacataggttggccgtatagtagtctgtaccatctaggtttgtgtaagtacactccacggcgttcgtacaaggacaaaattgtctaaggatgaatttctcagaatgtgtcccagttgttaagttatacatgacttgtagtgattcctaataaactggagacagtggtagaaaaaaagtattttattttattgtatgtccttttgtattctttaaatttgctttgatgtacttatgtttctttttttaaatgtgcattttttaaacaagtggaagagaagatggaaagaaagaacttcatttcttgagcatagtttgtttttcccaggcctatcaaaataacacaatcttactgcaagaagaggcacaccctggaataatatcaggatgctggcaaatgctcttccaatttttctcagaatgagaaaatgtaaattttaaagtttaaatctttttaacatatgtaatcttatgagtaagaaggttgagtatagaaaaattcttcaaatttccctgagcgtttagaaaagatagtggttactgctgatatttaccattatagagcacttattttattcagatattatatcatttaattctcaaaaccaggactggctacataatttgtgggcccagtgcaaactgaaaacaagggcttcctgttcaagacctaagaatttcaagacagtggaagcagagcttgaaaacaagcatggaagcctcctgagcaggggccctgggcaactgcataaattaccagcccatgaagctgtccttgcttgtaacacacctgtgaagaaatgtgttactcttactttaaagatgaagaaaataatgcatagatttgagataagaaccaaccagccccaaatgtcacagtgtataaactatggatctggtgtttaataattgtggagactggctccaatgcctctacttataaccactctaagaggaatcagctcccaaatgtaaagacaagtatttctaaactatttcccatttttactagggaaattaacttgcagttaaaatgaatagtattttaaaaagaaatgtattttcttttcatgatatcattttagagtcttaaatagactcataatcaaaatgaagaaaggtgactgggtaaaagtatagttagctagatacaaagattgttgaatataggtcaaactatattctattctagttttgactctgccatattaaacattttagtgaaggcactacgttattcttatcatgcttgaagttttcctcattctaatgcattgagtgacaggagtatgattccatagatcttaatatataaatagaaatgatagatttaaaacaaacagtttggcaaaactttcaaaatttttctttgcttacaaatgcaacattttgcagataatatcttatagaagaactttggaaactaaaggaatacagaaatatacactgtgcaacagaaattttctctactttctctgtcaaaaatcaaccaatgtttatgtctagcattgtttactcaatagtgtaaagcaaacgttttccaatgacattaaaatatttgaaatataatactccatccacattcatataccataatgtacttaaaccatcatctatgacatgaggttgtttccaaaagttactgttagaaagaccctataaacaaggataaatattatatctagccttcagcatcaaattaaatctaaatgttaaaatgctagctgagagaaatctgttttcataacatttaaagagaaaattacttgattactgtatgtttggtgtatgtaattattttgcatactggtatttttcacgtggcattcatcttcacaattatttgtgtgattatcatcgtccctattttgccgtaaggttcctaaatatggagtttctattttactcatttctgaatgtcctatagtgaatatatattcaataaacattagaattttatagaaaccttgtggttcagctgctgaataacttacacagttttagaattctttgattgactatggtgtccaaagccaagaaacattggttttggatgacgaatcaagttatatctacttctagcaaataactggcattatagagtttgaaaatgatatttatcagggtcatgattattagatttcaaatcttagaatatcaggtagaaatgatattcaatttactctgctttcattcagaactcaaaacaagttttaacaagaggaagtcttaatcaggcaggattcctctggttgttaagaacatctttcccaatggggaaagtttgcttgcatgctaagaaaggagctttctgtttcagggagtagtgagctctgtaataatcaggaggtcatgttaaatggccttcgtagtccctctcctgtctatatttcctaatgattctaacacataattaagtgtcaataatagttatagtcaataactataagccataaggaaatttagtacatgactgattgttttttattctgattgtatgaagtaggttttgagagtgattattaatttgttatatgtaatgagttctaccctatatttacagggtgaatgcacagttttcttatttctccatcccgaaggaaatgaagtagtatttttcaattacagtgtagtagtgattattatatagaacaattacagactcatgtcttactactcttttattaaaaatgattcatttttctttcttaaaaggttgagtatatttttaaatgccgcttcacagtatatcatgttgtcatttccctttaccctccatgggcacatgtatccaattttataagtagataccacgaaaatattaatattacagaaattaatttaagagtcaaatttttagtagcacaaatgttctatgagattggatataactgcatgaattagcttggtattttcagaatctctgcattctggtctgtatgtttaaaattaggtattttcttaatctgcaaaatattatcttctagcctccactgtatgcaaagaaagtgtgctcatggttaaaaaaatattcaaataaaaaaataaattatcttgggatcctactaaaaactgcattttctttgcaaagcaagttttctcatggttaaaaaatattcaaattacaaagtaaatgctcttggaatcctactaaaaactacattttctttttgactagaaataaaactaattttatcacgtaatggtcattttgtgttgggtgcaatgtttgagtttatattttaagctttttttagagctatgttgctttctgctttcatcttgacataacttgtcaacagacttataattaaagttgtttgaggttcagtgattcattctaaataatgaatctatggagatcctagagaagataaaacctgtgcttggcaaatgtagaaactgtaattcttagtatccttttagcctaccaaaatggaaatccttcagtccctcacataggtaaagatatgtctttaacaaaaggtagcctttttaagctatgtatgtcaaagcaatttttacttaagacatcatggaaaagattttattccttcactgttcattgccaatttggaagctgaaataagaagatcctgaggcttttcccatttcctcacatgaaaggaatcagtcctcgtgtatgaggcagggagattactacaaacccttcccttacctcttggcaaattcaggaaaattgctaaaatgaatcttgacccagccagatccctgctcctttgcttgtaaccagaggcagtttcaatgcaggcctcttgtgacttccttggaaacagaccttgcatataagttggattgccagaaggataatgattaccatcccaagaggtaacgttacaatcgtcatgagaggagctctgtgagacggagaatatgataaggaatgattgtctcaccattatatgacttgtctatctcgtaatgcccatgtattgaggtgatggcctctcatgtcttggctcacaaaatgtattattccaaagatggatgaactgttgcccccggcccgctgccaaaagtatgaacaggaggtaattgagattctaaaccaagaagtgtctccagtgatgaatatgggaactcaaatatttgaacataatcactaatttaaatcaaacaagagtagtgtgttttttagcatttgaataacattcaacataaagatatatatggactaatacatactttatgttaaccttttattgtaattttaaaagctgtttcacttatttgattaaagagtcgttcattaccaagttgaaataattttatttaaaaatgtataacataaaataatcaatgtgtatgataaccaaaaatgcattctacaaactattaataagcatttaaaatgttctaggcaatggaattggtactgatgtacgttagtaacattcatattaatgtaaacattttaaacagcatgtagaattaactatcagaatgaattatactctacatttttctcctctgcccccaccccttatttcctacagtttgaccaatatattgaaggggcgctaaattgactttcgatgttgagattactttcccttgctatttcagtgaaccaaacttaagtcagataaaacaattttatttggcttcaatatggtgctattttgatctgaaggtcaatctaccaacaagcaagaacagtttctcattattttcctttgccactccaagcagtctttactgaagtctttctagcaatgtctgacctctgtttcaatacttctcacagatttcacaggctgtcaccaccactcagccatcactaacacagacaactgtaatggaaacagtaactacggtgaccacaagggaacagatcctggtaaagcatgctcaagaggaacttccaccaccacctccccaaaagaagaggcagattactgtggattctgaaattaggaaaaggtgagagcatcttaagcttttatctgcaaatgaagtggagaaaactcatttacagcagttttgttggtggtgttttcacttcagcaatatttccagaatcctcgggtacctgtaatgtcagttaatgtagtgagaaaaattatgaagtacattttaaaactttcacaagaaatcactatcgcaacagaaagtaaatgcttaatggaaatggtgttttctggggtgaaagaagaaactatagaaactataggtgataaactactgtggtagcattttaatcctaaaagtttctttctttcttttttttttttcttccttataaagggcctgcttgttgagtccctagttttgcattaaatgtcttttttttccagtaacggaaagtgcattttcatgaagaagtacacctataatagatgggatccatcctggtagtttacgagaacatgatgtctcagtctgcgcatcctaaatcaggagtaattacagaacacatttcctgttctttgatatttataaagtcttatcttgaaggtgttagaatttttaactgatctttttgtgactattcagaattatgcattttagataagttaggtattatgtaaatcagtggatatattaaaatgatggcaataaaattttatgagtgcaaagctggcataaaaattattttaaaaggtacaatttccctttcattccagttattgtaattctaagattaagaaagaacgttaaaatctgccgtatgtttttaagcagcatatgtttagaaactcatggaacacttgacattagaatttgtgtataccagggtagagaagtttgaaaagaacacacatctaaaaataccatgtcagatgttctaagaaaaaaaataaatctagagaagttattcaaatatattatttgggatgtttagtacttctctattaactaatgacttatgacctactttgataattccaaagtaaatcactgggccttttctccctggttgtgtcagcttggctaagcaaatccactagtccaggggtcaccaaactaagacctgctaaccaaatttagcatgctgccagtttggtatggctcatcagccaagaagtgtttttacgttttcaaatggttgaaaataatcaaaagaaaaataatattttatgacatgtcaaaattacataaaattcaaatttcagtgttataaataatgttttagtggaacacagccaaactcatttatttatcacttatgattactttcgcattacaacggcagagtttgaatagttgtaacacaaactgtatagtccacaaagcctaaaatatttattacctatcctatcacagaaaaagtttggcgacccttgctccagtcaaatggctctcaaactctatgaatattagcattctttttgtggcaacaactttcaggaacttccaagcactctactcacgatggtaatagaaaatctaacaaaaattgatggagtgaaaagcataatggcacaaatccgtgaagcttttgatgaatttcttttattattcctagtaagatgtacattaacttgtttgttgtcacattaaacatgtgtttatagacaacgcttagtggacatacagatttatggatactttgcaacattccaacaaccctccaacagttctccaaacagagtaatagggacacctagttgcctaacacttttaatgtcttcaggacttgcctaatacagaaattaacagagcaagctgattcatgtcaatctctgtcttcaaaagcttattattggctcctgtttggagaatggattgtgttggaaaaaaaaaaaaagtgtgttctgacttctttttgttttcaggaaagagtggctagtggtgaaataccttctctccaaaatttgtttgtatcataagttttcggcaatttttgtatgtgcctaaatgagaagtcccattgggcacatacagaaagattcttcaaataaaagctaacataaattgaggatttattatgtgctcagtagtagattcagtgctttattggcatcgcatgtatttttcccagtaacctcccaaaataggtatggctataattactttataaaattatacacagctacagtgtacctcagacaggatttgaactgaggtagctacaaaacctgggctgtatagtaaaatgtctttttcatagatatatgactaaggtaatcctattgatttacctgaagccatcccagttacacctgttgtcccagcataattatatatagcatcaactttcactctcaagtgtgtcctgatttggacggcaaaattatctgaacacgctatatacgacacttgattgataaatttagactgaacgaagatagcaaaaaggcaaacatttaggaacaaattcattaattgataattgtctacagggtggaatcttgttaaagtattgtaatgattaaagaggcatcatgcaaatataaccataagctttatattagctagtgccccgtttttgtatcatctgaagcccactaatatttcactgaatattgaggtcttgaccatctgttgaatagtgttttatttaaatgatgtcctcttccagcttctgtgacacactaccagttgtcacccacgactctttacctgacttgttttattccttctgccttattcctatgggagtatcacacagatccatctctttgcctttctgacttcttttattttgagacagtgtcttgctctgtcacccaggctggagtgcagtggcgggatctcagcttactgcaacctccgcctcctggtttcaagcaattctctgcctcaacctcccgagtagctggaattacaggcaccctccaccacatccggctaattttttttgtattttttagtagagacagggtttcaccatcttggccaggctggtcttgagctcctgacctcgtgatccacccacttcagcctcccaaagtgctgggattacaggcatgagccaccatgcccggccttttgacttctttatctggattatctcctctcattgattcgagcctggctctaagtgactgactcccaaatcatgtagctccagatgtgacactctccctcaaattaaagctttatatctctaaagctatttccgcttgtgcatccagcaactgcctcaatgttcatcaaatgcaaacatttgttccttccaattaaccatacctacttatacattgcacacatattttagttataattcattgcctgtgtgtctagagaagtagcaaatatggaaaaaatcattgcttttggaatcagaattactgaggtttgaatgctgccctttttttttttcccaacttttagtttaggttcaaggggttaacgtgtaggtttgttacatgggtaaattgcgtgttgtggctgtttggtgtacagataattttgtctctcaggtaatcagcataatatctgataggtagttttcccatcctcacctgcctcccaccttccactctcaaataggccccagtgtctattattcccttctttgtgtccatgtgtactcagtgtttatctctcacttataggtaagaacctgtggtatttgtgaaacctgcctgttttaattactagcttatgagcgcaggcaaattacttgttatctgtgcctcagattccagtattctcactttataaaacaactgtcatgaggattaaataagcatttaatacattgcctttaaggtggtaaacattcaataaatgcagtggttcgattcttatttggtggtggagaccatagagatgatgaagatggaggaagattgtggtgggtaggaggagtagaagtgatggtgggagaggtaacgatagtagagatgatgatgatggtggtggaggtagtgatggagatggtagtcatctattatcgacagggaaaaattccataataaacattatctcaaacctaagaaatgtaaaattaccttcctgttttcctcttcaaaacagaatttaccacctgacatctctagttctgtgaatttttcttctactttcttttccttatttattataattagattgtattattgggcaagtgccatcatttccgtcatttcatgttcattcgaattgccaagtccataacctgagccatatacctcactgtggagagaactgccctcctttctaattgatttactaaaatgaatatatctaaaatgatgctttttgatgtctctccagacatgcgaattcccataaatccagatacctccaaaataaaacccaagtgcttcctatggcattcagtattattctcattctccactaattttatgtctaccttcccaataatcattattccacttcagccagtaaattacattacattcgttttgttgtatgccttcatgccactcacataaaatttctcattgcccgtcaaaacaaaggaagcctattattacacttctttatgttttacttagattccattgtagcaaataccgtggatacaataagtaaccaataaatgtttgttgagagagtgaatggtatataattcaaataattgcagtaactaaaatttgacatttcaatatcatttaaaaattctacctagctcttcctggaattgttcttaataataaacgtgaccatcctgatgatctttaataattccaattttacccattagggtatccttatttacccaaaacaattaagggatttaaaattcagctttctaccacatagtttcttaactatctaaggtacatttagtcgattcctaaataattatacagtttctacatatgttgtatttattgcataaatttttctctttacactgagatttgcaaaagtgtctgatgatcttgggtcacaagataattatttctaatagcaaattattcctgcaattcagtgatattattgtacacgtaggtaattatcagagtaaggaactcagcctagggtaaaactagatctattatctagttaattggtatttatccaggagattacttcctaatcatgtagcagttattttaagggatttttaaaaaaagctttaatttatacttttgtagcaaccaggcagaatgaatggcaaattgtttttaagtgaatgccatcttaataaagataatttcccccaagtaaagcgttcataaatgaatatctttgtcctcaaggataatgtagaggcattttgaaatgcctcagttcacctggtctgttttttccctccagggtaagcagacagaatgtaagcttgctttctcggctatttcctgcatcctaactacataggaggataaattgactgatctacatacctgaattattattatatattctacttttcagtttgtttctgttttttgtttgtttgattttctttttatggctgctgtccagatgaagttaaattgtgtcacatctctggaaagaaaatagataacagataagaccgctctgcagttttgtgagactcatgcctaaaacatttttgttttagatattgattataacttcagtttctaaactaaaatctgaaagttgtatggcaaaatataccaagttatttgaaggacctaattagataattaatgtgtccgtgaactttttttttttaatgttctatatgataaattgatcctaaaatatctgggatgttaaactcagtaatgacacttttgcctattggcacagcccatagaaacaaaacattttagatgatttgcttctttttttcctaaggagactagacttatgcatgtttacaggttaattgaggtccagaaaggttaaataacttgctttcagttgcaaaataaggactggtgctgactctcctaaatccattctagtgttatagttgcaatgtcatgttactttttatgtattaaaggaaaatgaccttggtcataaattcaaatttcgctttagacactattttttgttaaaaaaaaaaaaaaaagaaatagaaatcttgcataccatcttcacatcctcaaaaagataaccatctattaaatgttcttgagattatgttgtcttatgcatcaagaataaatcaatagcagtgttttgaagaatatagtaatgtgaattctagagaatgctatgggatcagagaatacttagaacagtaatattcaaactgcagtgcatgaaacagtatcatcacctgggaccttctttgaaatgcagatttggagggcccttcccaaacctgctgaatcagaaacactgctggtgggcccaaaaatattttacaagcactctcggtgatacttatacaccataaaatttgagaaccctcgcactggcatgacaacagtggttctcatgcttcagcatgcgtcggagtcaccagagtttctaattctaataggcgtggagtggtgcccaagaattttaatttctaacaaggtcccacgtgattctgctgctactgatttagggcccacactttggaaatcagttcactggagtgtcttgtcatttacagtctgacccctgattctctttccttatgacagcccccataaaggggctttcacgtatgtccgtgtgaagagaccaccaaacaggctttgtgtgagcaacaaggctgtctatttcacctgggtgcaggcaggctgagtctgaaaagagagtcacggaagggagataggggtggggccgttttataggatttgggtgggtagtggaaaattacagtcaaaggggatttttctcttgtgggcaggggcgggggtcacaaggtgctcagtgggggaggttttgagccaggagaaggaatttcacaaggttaatcgctcggttaaggtggggcaaaaacaaatcacaatggtggaatgtcatcagttaaggcagcaaccgggcattttcacttcttttgtgattcttcagttgcttcaggccatctggacgtaaaggtgcaggtcataggggaaaggatggcttagcttgggctcagaggcctgacaggggccatctattcctgggcaggttaagggatgctactgttgcatcttgtgacaccttactgctttatgatgaaatgatctatccatatgcttgtttcatccactagaattaaagcttccctgggccaggatccatttcttgttcgttacctgtgtgatgtcttctgtgtagtagatgctcaattcaagctgtgaatagaaatgcactatattgagaactggtcctatgagatactatatctttggatgtctggctacagtagctatgtgaaaatgtattcttccagaatgcaaggcgtaaaagaatatcaacacgaaagaagacaggatcacattcccagagctgttacatataattttgttcgttttttgagtgaagaaaatggtactcatacttattcatctaaaaggagaagcatagttgagtgcaaataaaagtcagtttttaatcagaagacctgaactatctgtattcccttacggactcctgattctttcctttaccctctcatactctacatcgagcactgaaactgctctcagcaaggtcgccagagagctccttaattgccagctccaaaggtcactcttcagttcttttccctttttgacctttgtcttgtgcttgacagaaatgattagtcccttcttgaaatttttctctcctgcagtttctgggacattgttctctcctgttttctttcagagtatatcttccctgtcttctattcctgccctttaatgtcagtctacataagactcaaattgtgattttattttcttcttatgatgctttattttttggggaaatatcatttataatctttatcatcacctatatttttgattcacaaattgatatttctacctctccctctctcctgatgttcatccctgtataattcaaatgcttataggctatgtattcctggatttctgactggaatctaaaatatagttttggagtttagatcgtataactctagagagggtcattcacatcatagtctctaagaatggtacatcctgaacttgtgcagtgagcaacctgtgcagccattcacagtggtcttgatatctgccacatcactaaatccctccaaatgtacctgttaaattctctttagtttgttatttttttctacatccttgctgccttcactctagttaaaactgaaatttttctgtatgaaatttttaactgatttctctgcctctgatctcacctctcttatccatgctttttacagcctcccgagggatatcttaaaatgcagttttaattagattattcccctgcccataaatcttgaaatgcatggcgtagaaattcttttgtgatctttagctgcctacctctccagcttcactcccttctcctctgctccttttttaaaaaaaataccagtgctactccaaataatctgcaaactttttagtaccagtccacaattgagataagaagcttgagccagaatataaatcaatgtactccttcctttgtcaagaaagttcggcaattaaaagcaaaataagatcaaatcgtttgttcagtgactcagttgatttatactctggtgaaaactcttttcttcttacagactaatagcaaacagttcactgtctgctaaagtctgaactttgttccgcactgccctatgctttagcttaaattaaccactctttgatctccaaatgctctgtgctttcttaagcttctgtttctttgtacctactgttttctctgcctaagattctctttagatacctttctttttcccattcccatgttacctgccaccgtgctactaaccaccttgtctttctggttatctaaccttgcagaggcagttctcagccatttgtgtgttttttttttttttttttttttttggagacggagtctcactctgttgccagtctggagtgcagtggcgcgatctcagcttactgcatcctctgccccgtgggttcaagcgattgtcctgcctcagcctcccaagtagctggcactacaggcaagggccaccatgcccagctaatttttgtatttttagtagagatggggtttcaccgtgttggctaggatgggcttgatctgttgacctcatgatccgactgctaaggcctcccaaagtactgggattagaggcatgagccacagtgccaggccacttctcagcctttttaacacttctattaaaacacttgccaaattgtatggtaatgactttatttttgcatgcctgtatctccagtaaacgccttgagggaagaaatcatttcttgtcatctgtacacctataatgcataaagcagaagtcagctcatagtaggtattgaataaatatttattggatgttgatgagggattttccaggttttgtgcgagtcttgtcagaaaaacaaaatcactgtgatttaaagagaggaaacgtaatataaggaattggctaagcaggtagtagaaaactgagacgcagcgcaggggatggagaggcaactcaaagcactagtaacgtaaggaagctgctaatatccctagagctggagaaacaatacagaaaaagtgatattaccagagctcagaagctggggctttctaacagagattaaactaaagttaggactgccaggcagaaaattggattgttgaagagggagctagctatccagagaaaacagaagccacagcagagatacatctgctctagaaatgccacccaaggtagttggagaagaaaaaagaccttggcttttctcttcctcccaccttccaatattctgccattgcctccaaatgaacaattaggagggcaagtggtgttgggaaatgtatatccctctaatacagaaagtacagaagaaatgtggggaatagatctgagagcagatgggcatattactgcacagatgggttctggccgtgcatcttctgctcataaactatgtgacttaagccacttaatctccccaagaatctatttcgtcacccctgaaatggaatgtatatggccttccctgtttgccctcacactgtggaaattatattacatgtgtttgtcttgaagaacgtttacatttaaaaaacaatgtctcctttccccaggagaaagttgagtttccaattattaattcagggatggtatcttcccatgaccacatttatatattattcttattctgacatcttctgagagtattcttagtaaagtcttccctggtcagaaacctgtctctttacaaatgaacacatattatgctaccacagagatataaaaatgatgccaggctgggatggcctgaattgtgtcctccctaaattcttatattgaagctctaatctccaatgtgatggaatttggaaatggagactttggaagataatttgatttagatgaggtcatgaagatagggctcttctgaggagattagggcccttataagaagacacaacaaagagcttgctggctctttctccctgccttgggaggacacagcaagaaggaggttgtcttaggctgttcttgcactgttataaagaaatacctgcaactgagtgacttacatgaaaattgatttaactggctcacggttctgcaagctgtagaggaagcatggtggcgtctgcttctggggaggtctcaggaagctttcaatcatgatggaaggcaaaggggaaacagtcacatcacatggaagaatgggacaaggagagtgagacagtgcagggggaggtggcacacatttgtaagtgagttctctcaggagaactcactatcgcaaagacagcactaagccgtgagggatccgctcccatgatccaaacacctgccaccaggccccatttccagcactggagtttacaattcagcataagatttgggaagggacgaatatccaaactataccagaggctgtctacaagccaggaagaaggctgtcaccaggaactgatcctgctggtaccttaattttggaattgtagcctatagaactgcgagaaataagtggctgttggttaagccacccagtctatggtattttgttatgtaagtgctagctgactaaaaaccggctttgttaagcaatgagtattacttctgttttgactaaagttcatagtgatgcttactaacacagtagatggattgaaacaggtcatgatgctggcagtggggcattaagtacacgtcagattgaaatggctttccacattgcactagatccttttggaacccgggttggaagttatttaaacttgaaagacccacaagcatgttgacttctcttaaactcaaggacctttcacactgagagagtttaaagtttaaattgcctcccacagggtccaagtcatcatccaatgcatggtgggtttctttgaacacttctgtagtcattatgagtccacatcatttcaagaaagaagagacagcaacattagttttcatgctaattttcctattcactcaactaatatctaatggattgctatggtatgtaaaacactccagttactttaactgtaaatctaagctttccctcaggaagcttgcacccagcataaactgtcatgaagaagtactaataaaatgttagaaaagttttaaggaagaaaagttcacttcctgcttgagaggcatggaagacttatgggaaaattagcatctgactggataattaaagagtagggaagcattgggctcaagatgaggaaagtgacaattcattgcaggggaaagcctgtatgcgaacaaaacttacatgggattaagtattcttgtttgcctccagcagaagtatgaagtaaaggaagtttagaagtaaggaatgaggttgaaaaggtaggttgagttcataataactaaaggtattcaataaaagattaaggcatgtagacttaaaccttctggtcatggggagccattgcatatttttgagagagagaaatatgatatggctactgtgaaccatatcattttgatctcacttgagagttgggagagagaggccatcttaccttggtttcatagactgggaagggggaaagaaaagttttctctaaagggccagagagtaaatattttaggttttgtgtatcataaaatttattttaaaactactcaactctgctgctatagctagaaagcagccataaacaatgtataaatgaatgagcatgactgagttccagtaaaattttatttaccaaattagatggcagaccatatttgtcccatagaacatactttggggattccggcactaatgggtaaaatgagactattttgctgttgatttttgtttatatgtttcattgtctttgttatagctgtgtttgcagtttttattcttgttattccaattgtggcttttactttatcagtcattaagaagacactaaaacaaatatgactactctcacacgtgagaaagtgagaaatggcatagggcttaaagccagttaaaaaaggatcatggaagatattaataacaatagctaatatgtatatggcttctaccaagtatttgctacatattaatgtatttcacacttaaaatagcattacgaagtaagttttattattgtcactctttgccaatgataacaatgtgtcatagaaatttcaagtgacttgctcatggtcacatagtttacaggaagcatcgcagctaggatttgaacccagacagcctagcttagggtgttgccttcggaaattcctcgccttgctatgttgtaataagttaaaggtgatttcatcaaattatttagctgaaataaaatgcttgactgggactccttaagaatttgccaaagtctatggaagctgcacttattctagattatgtctgttctacattctgaagtatcattgactctagtgtcccatggcaacacttgattatctttaaatacagagacctttttcactgaaaagatttctttaaaatttagatgtctttttcagcatcaaaaataagtggaatttccatataattgaacttttttttccaagtgcaagacttttggagctcaccatggtcttaaccacattatataataagtagtaacttttttcatctatgcttaatattttctctgatgtgagaaattgtatcatcagattagaaagttgaggattttaggaaattaagggaaattccaaggtaataataaattgggaaataaattattttatattgccattagggtacaaagtatacaactaaggatcatattttaatgaaaaatttcagaattaatatcctgatattagagacttcaatcaaattctcatataatccaagatagcgtagtcaaaaccactaaattactgtactgtgtagcaatgaacagtaattctatattgacttatccttattttttttttaagatgggtttctcgtttatttggaacaaaagaaaaatgtagtgttgtagaaatctttggattcagacagacctgttcttgagtcttgactcagtgcttcactgtgtattgaaactaaatgaagatcttcaacttttctattcatgatcaatctgcaaaaataaaagctattacagataacatacaaggtttcttgagcgattaagttttctttttgaaagcctgtgacctgattaagatgcttaaaatgatatatatgtctcttttctgttctttaaatttgaatgaaagtttggcattttaaaaaactttaggtgatttaggagtataattttaagcagatttttagagtacgagtgtccacatatttaactaaacattcaaaaattagttaaaatcaatgaacttgggaaggaaaactacttgctacataatccagaaaattttactaaattatttgaactaagcatgactctccaaactgtggacatattttctcaagggattctatgtattatggcttcaaggtacttttgtgtgtacctcaaaatggctgaaggcattttaacagtgcatctgagagtgtcttacttacatattatttgtacactattttatctatatctttggacattttatatttctgtgtaagtaaaacttccatgaaaatttcatttgtcaccatattttcgttatgcagataagaaaacgaaagaagccaaattgaagacaagctctgaaagggaatgtgcgccctctagtgacccacatttatttatcataaggacataggcagcttttgggtttcatcattttaaataaactttacatttgattttaaaatatatgactcaggattttcaacttgagtatattatattgtatgatcatagatttattactctgacaggatttcatctatcatttaagagaatatttctattaacctgtgttaaggtgattttcttgcacagaagtgtgtttcaaagggactttcaatttattgaaaatgaaaaataggctttaggcatctgtggcttagcagcattttatttcccatcctctgggtcatgcagtttttgcccacgtgttttcacactccttggctttataactaattcctctaatgtagcagtatctgacattttagaatttgtgggggtttcttaccttttaatttttaaggttgtttctctcaaagatatttaaacaaaacttataaatgtgacatctgttcaatcatgtcacactttagaaataaatattaccaatgaattttgaaatgattaagatttaataccaaattaaggtaggaagattattttaacatcatttctacctaccagacgtcaaaatattttaggtaagttttactttgtgcagagaagcaatattttacagcagttttattctcttcactgcaatcaacgattctatgggtgccaagatgaatatcaataccaaataactcagacatttttggcattaatagcttaaaacattaaatcattcaatttgtatgcaagggcatgtattttaaaaagcagaatttttaaacatactaagtatataattcggtatgccataattgataataaagaagatgtacaattttaaggacaatattttgtgcttggactagaattcagcttttgaggcacatgttaaataggcatattttaggacaaggtaaacgccacagaaattgattttttagtatcttttaaagatgcctttcagtgcaatctgaaatcattaaattttactgtactgaaacatattattttatgagtgatgtgcttaaaattacacatataaaactagaaatacatttgagaccatgcaaatataaggaaaaatagatttttgataggaatgttaatatagcagtttccactaactgaagacagagtcctctgtcatctgtcacattgttccaggtgctgtgtaaaccactgaagagtttataggctttttattataactgggaattataacatctttagattttatttaatttgattgctagatgaatagactaatgtaattggaatatgaaagccacaatataagcaaagctgatctcagtttttgtatcttgggtcaaaacctctttaattagagaggtaagtaaacatatttacaagtaatttttaaaaagcatttgtattgtagacccagaaaatctgagacaggtctcagttaatttagaaagttgattttgcctaatcctaggtactcgggaggctgaggcacgagaattgcttgtccccaggaggcgggggttgcagtgagattgtgccactgcactccagcctgggtgatagaatgagactttgtctcaaaaaaaaaaaaaaaaaaaaaaaaaaaaaaaaaaaaagttgatttttgccaaggtggaattcgcgcgcctgtgacacagcctcaggaagtcctgacgacatgtgcccaaggtggttggggtgcagcttggttttacacattttagggaggcatgagacatcaatcaagtacatttaagaaatacattggtttgacctggcgcggtggctcacacctgtaatcccagcactttgggaggctgagtcgggcggatcacaaggtcaggagatcgagaccatcctggctgaaacagtgaaaccccgtctctatgaaaaatagggaaaaaaaattagccagacgtggcggcaggcgcctgtagtcccagctactcgggaggctgaggcaggagaatggtgtgaacctgggaggcggaggttgcagtgagccaagattgtgtcactgcactccagcttgggcaacagagcgagactccgtctgaaaaaaataaaattaaaaaaaaaaaaaaaaaaaagaaatacattggtttggtccagaaaggcaggacaactgggtgggggtgggggcttccaggctgtaggtaaatttaaacattttctggttgacaattggttgagtttgtctaaagacctgggatcaatagaaaggaatgtttgggttgagataagacattgtggataccaaagttttatcatgtagatgaagcttttagctagcaggcttcagagagaagaggctgtagagtgcttcttatcagacttaaagtctgtgttgatgtaagtgtcagagaggtataatgaggcatgtctgacccccacttcccttcttggcctgaaccagtctttcaggttaaattttaagagccctggctgaggaggaagtccctttggagggggagttagccttttatttttggtttacagtatgtttttacttcaggaccagtttgataacagcttttaaatttttacaatttaaagcaagaagtcgctgaagatcgaagaaattaatttacccaagaaaataccagaaagataaaaattagggattaaaacctgtggtgcctgatttacacacacatatatagctatgttatttttttttcttttttgagactgagtctcgttctgttgcccaggctggaatgtagtggcacaatcttggctcactgcaacttctgcctccctggttcaagcaattctcctgcctcagcctcccgagtagctgggattacaggtgcccaccaccacagctggctaatttttgtatttttagtagagacggggtttcgtcatggtggccaggttggtcctgaactcctgacctcaagtgaactgcccgcctcggcctctcaaagtgctggaattacaggcatgagccgccacgcctggccctcagctcagtatatttttaaatgcacatttactttacatttaaagcaacttaaacatacacacaaacacacacgtatcacacatattacaaaatacaagacaatcatgtggccctatcttccccccttccacagagggagacacacttacactatacaaacgtgtatgtgttgtgtgtgtgtatacaaactatcttgatttggagagggaactatttatctaaatattagcttgttttcttttggttaaataggatttcccctttaataatattctgtaattccaaaaatataataattgccatgtagtcaatgcatctcaaagtcctaaaaatatttttagaactaataggatttatactgaatttcatttgatatttttataagatctatttgatgcaaattgaatttgtattctattactcgatttttttttaaagcaaatgccatgtggaaacaagcagagagggacaagttttcccagaaggaaagttgaaaggggaagagtagagagaggttgatcaagaaaaccttcacagatgatgtgcatcttgaactgagccttggaagatgaatagtaggtcatcttcaaatggttggggatttagggtcaggaaagtgcctgtatagtaatatggaattaaaatgtcttctcacttcggaaaactctgaagaagaaaggtgatttttaaaaatacagcaaagttggaaaatcttacctccaaaattatttcttctttaataccaacaaagaataattatagttttgttcctattaatgttaaaacttgcttcctagctaattaaaatgttcattaagaattggtttcataaattatctggtctaggcctagagccctgggaccctgcaatggttaacgtatttcacaggcatcagcattttcctttcaggtttctaaggatgaggcttataagtttttatgaaattctacatgctaagatgtttaaatatgtaaaatggccattcataaacctagttcactaatcaaattagttaagtctgggagcttggaggacttccactctcaaagtttacacatttgggaatgatgagttgcaacttgtatattgaaagtgactgaattaaaatttatgtaaatgtgtcatcttagtttaataggttatgtggcagtcactgtaaagaaaattaacagaacacagtgcccatcaggaggctcttctgacataattagcacagttatatagcactaattcatgtaatgttttactattgacaattcaaaattgacaacttcttaaatggcaaacatttctctagttctttgagatgtttgtatgtgtttttgcctttgaatttattttaaacatttatatacacaggtatctctcagtatttaccatatgggatgtaattaacctaatttacatcatttttatgggaaattcaactggatgaggctgagtctgtttgtacaatataatactgagaaaaattgtcactctctgaatatttggtatatatgccccaggcttttgatattttgaaacttccaaaaaatggaaggtctttttgaaaaattgtcttggtgtagtaatacacttttgccaagaaaaaaaaaaatcaaagacttacttgccctgtatgatgggactttacaagttttaatttcaggggtttctgatgagtatatttgtaaaggagaaaaaaattgtcgcttcactgctaaccataaataataacaaattgaggttttaagatatacttgaagaatagaggacagaatattcatcaataattatagaaataatcattttgtgaacagagaatgagaagttatttttttattagctaaaggagattttaagctaggtaaagttagactgcatttaagggatagagtctgataacattcggaagtacgttaagtacagagttaagtatatgaggaaagtaagttaagcactaaggaatatattagtggactgattccaaaggtgtagggacacattatgagcaacttatgatacataagttcattagcaatggttttatgtgagttgttaaagtggggaaaaaagaattattagaaacgagtaattttatgaagaagcaaaaatacatgtacagaatccaacgttgaatatggcattgaaaataagtcttcagtgttttccttgagggttttaaagaaggtaactgagttgcatctgaatgatatatttcgttcgtaattaaatacccaggctcacttagtgcaaagtatgatagaaaatgccatctgcaaagcactgggaagagtagatagcacccaatttaaagcatgaagacatttaaatcagaggtgtctgttcatttgccatgcatctcagcaaagatatctgaggaatatctagtagcagtgaaatacatgaaaactacacgacaaaccacaaaaagtgatgaagcgatagttgctaaattgataaggaataaaataaacgtgcaattgcttcttggaagccagggtctgagtaggatccgggaaggagactgagttcattgtgcattgaaaatgtcactgaacctaaaactaagcgttggatgtaggccattggcactcagggagagtacatgggaggccttgaaaccctgcctctgcttcctcttcacccttccatcctcattgctggcataaagagatgaggctatccactggcagaatattggagagaaaacaatgctagtagctgacagttaactcccagaactctaagagatggtggtacatgttaagtattagagtgtaggctgactgcacattatgtgtggacaaaaagagttttagcaaggaaatcagagatgtttgaaggaagaagtccaaatggaagcaacataaaataaatattaagattaggttaggaatagctcagagcttgaattgtgtaagaattgggttcagtgtccacctgtttcccatgaaatcaagatatcacaataatgatagaaatgaaagggaagaactccaacaggtgagaagagtccaaactcattaatatgtttctttgttccattttagaaaagaagtataacattaacctctgtgcttatgaataggttattttccttagacaaaacgctctcctcaccactgccctagtaaaatttgaaattgcctttttaaaaatctgtacatcaaaaaacgagcgtaatcactctccatacgatctttgtataaaagggaagttcacgcactgtatgtgacccctttccaaatttataaagtcagacaaaaaattgaatgaggaaagacctttctgtagaatttcacatcctgttgtttgaattgatttgaattatcagaactacgtgccaactggtgtccaggcctcccttaaaatcttcacagacagagaagcaaacagacagttaccatggtgttgactccacaaagccttctttgtgtggagataaccaatatacttggcagagcctctaggctagaagctgatttaatcctaatttacagagaaggtgttttttgattatcctcttaaaaagaccagtgtgagctgagccccagttctgtgtctaaaccatttttatcttgtcaaacaaatgcttcactaaaccaaattacttgataatgtggactaatgcattctcgtctctgttctttatggagttaatagcatgtctggcacatagtaagcacttagtatatgctttatgaaggggaaaaaaaggagacatttgaccgttttaaaaggaaacatacaattttgcctttttcaggaaaatacacctctaaaagtgttacaagatttcttctggggccgggcgcggtggctcacgcctgtaatcccagcactttgggaggccgaggcgggcggatctagaggtcaggagatcgagaccatcctggctaacacggtgaaaccacatctctactaaaaatacaaaaaaaattagccgggcgtggtggcgggcgcctgtggtcccagctactcgggaggctgaggcaggagaatggcgtgaacctgggaggcggagcttgcagtgagccgagatcgcgccactgcactccaggctgggtgacagagcaagactccgtctcaaaaaaaaaaaaaaaaaagatttcttttggaatgaaaattatttactttcaaactaaaaacaaacaactttgtttcttttttctgcagtgaattggaggtggtggtataacagttacatcaacatgcatgttataggagcagaaaggctgtgatccctttccttcctccttatacaggtcatagcagacattcctataacaaaagataggttaacaagagaaaagcatgagatatttatctaataaaagttttaggtgacatgggagccttcaaaaatgaagacccaatgacccaaaggaaaactgtttttatgcttagagttgataaagagtagacagccatgtaggaatgtgattggacaaaaagggaatgatctgatagtaatagactagggacaaccagccaggcctgtctgtgtagaattccttcctcctacacatggggtaggaccccacttgaatgagggtcttatgatctactatcaaacaaaagtatgtcagagaattttttatggctagctaatagagagaaaggtgggcaaaatacagagttataattctggcttttatggttggctttggaggagagggtttttggtttctatgacctaccttgaagaagaagaattctggttactatgactcacttcagggaagaatgtggagttaaagacaggaggggaggagaaggtcagagggaccttggttttgaggctgcttttgaggccttccagtgttctttagttcaaagtttcagcatgccaaagtgccatactttggggtatcgttttctgagcccctacagtgtgcaaacaagagcaatgtcaattcaacgcctagtagaaatctttctccaacataggcttcagcagatttctttcagctgtcatgccagcctagtaccttgaggcacgtttgagtttcagggacctctaagtagaagtgagcaatctttcttagagatagtctaaatcaaatgagggtgagactagagagattaagtttaaagcgtgaatttgaaagtgactggtggatattcctatctcatatttatgagtcagagggtatttgatgtataattgagtcagacaaataaatttcaccaaagtggcccaaatgcattatattaacaacccagttttcaaaatatttatggaagagtcagtgaaggattttattccattggaggaggaacaagaataaagaatagctctgaattactttagaaaatatgaagcgaaatttgtttctacaagtacttgaataaaagacaaagtagaatatacagttaagaggtctatgaaggccagattataaaggatcatgttgaaattttgttctttattctaagaaaaatgagaaagtctttgagtggttttacgaatgaaggtaacataatcagatatgtttttactaccgtatatttcaaagtagctagaagagaataatttgaatgtatctagcatagacaaatatttaagattatggatatcccaagtacactgatgcgatctttacaaattatacggatatgttaaattatcacatgtacccccaatctaagtacatctattatgcgtcaattaaaaaagatagaaatgataatttttccagtagtacataaaagagagagttccataaatactgcccagaggccaagtgaaaagctattgcggtatttttggtcacatttaatggcaacacagatttgggttctggctatggagacaggaagaagcatacatattcaggagacagagaatgtatgtgtgacagattagactttgcaatacattaaacatgggaaggaagagagagggttttagttggtttgctgtaacaaaataccataaactgggtagcttataaaccacagaaatttatgtctcccatttctggagtttgggaagtttaatatcaagtaactagcagatttagtgtcttttaagggcaggcttcctggttcatacttggtgctctctcactgtgccctcacacggtggaaaagaacactgatctcttcagatcattttaaggggactcatttcatgagggctctaccctcttgacctaattacctcccaaatgccccatcttttaatatcatcacattgggaattaggcttcaacatacgaacttttgtggggcacaaaattcagtccatagcggagatgaagataacaaatatgagggatggtgatgctaattactgatctggggaatactgatagagtactagtttgagggagaagatcaaactttaaaccttggcatataatgtttaaggagattttgcagcatgcaagtggagacatccaataggcagatggttatatagctgtggaattcagaacaagtgcctgaattagagatatacatatcagaatcattgataaatagattgcaattcaaggcatgatgactgatgtgttttctggtgagagatagtagagtagaagatgattggtaatgaactaggtcttgacatctagtacataatgatagggtggaggaggatggacctgcaaagaaaaaattaccaatggtcatagaaatagaaggcaaattagaatagagtggcatcatgaagccaaaggaagaaaaattacaaacggatagtatggtcaacagtgttaactgtagtcctagctacttgggaggctgaggcaggggaattccttgaacccgggaggcagaggttgtggtgagaccagattgcaccactgcactccagcctggtgacagagtgagactccgtctcaaaataaacaaatactagaaattggatggactcagatgcttgagcaaaagtaagagaataaagttcaaaatgtaggtagtgggaatgactttaattaaaagaagggaaactcaaatgtaaaagaagggaatgagaacggtggctacatatgcgggtctgatggtgtttggaaataggaagtgaaagaagttctactctgataattgcacttgtttctgtaaggtagggaacaagatcatctgagagagctgcagaaagaggatgggccagagctttgataaaaggttttaatagttcctgtagagacttagagcccaacttgggaaaaaaaaaaaaaaaaaaaagtatggcaggatgctaggttcatttgaggctgttgattattgccttagtttgggttgccccaagagtagatctgaagagaaggatttaggtgcaagcagtttatttggaaagtgatcccaggaaacaaagtagggaagtgaaataagaaaaataaagcagccaataaagtatggcacaaatatagggatcaggttactgctggaaggaactggggctcaatcatgcagggaaccccttgagacactgtgtatcatacttcaggattgtccaactgaggggcaagggagctgggaaattcaccaattccaagctctcactggttaagggacacccctaaagtattaacattccagcactccttctctgtccaatatactggcaaatagatgcttgcagatagagagacacaggaaattttatgttgggccaaagcaaaaataaaaatgttttaagacattatgatgataaatatgcataaaagatgattgaaatataattcactggtttgggtaggtaatcaaataaccatagtaggagagtatttaaggagttaacatcgctgaagagagtgtgaaagatttttacagcatataattgtactgtatattttaatcaacattatgaatgaagaaacaggaacctgatagtcaaacttgtggataaaaaatgtaggaaagataaaaatcatatatgacacaataaaaatccataaacatttgtaatgcatacacagataacttactgacattcagtgacatgggatttagaggaatcaggatccctagtctcttaatttcaagttggatagcctcgataaataacaactcaatctgtatgctatgaaccgtcaagtttctgacccatggtattgaggtcaattaacttaatttctctgaagctccatctcatcctatgggcagctggaattggtgatacctaaccaaagaattttgtgagaatataaaatgcgaatatgtttttctaagggctttgtgttccattaatttctgtatctgtttaatttttaaacaatagcctgcaacaaatgtgagaaattctaactggtttatatgattcaaagtcccaaaactggagttcaatagatcaggtcatatgtttgtgatagtaattaggttgtgatataactggtttaatgatagtttatgtgaaaaaattcctagaagttttaagtcaattgaattgcaatgtgagttgaaagtctaatattgaagtgaaaatatttattgaaatcatgggctatatcaatgaaagtattataaaccagaaagataattattcttccctgtttattttacacactgctgatatgttccctttaagtacccaatttaaggaaactaagataacaacaagccatagaatatccgttgaagtaattaagcatagggtaggctgatgatcaggtatctactgataaatttaaagagcggatttcaaatatttataattttgtatccttttgccaatatctttccaactactctccacccccaccagctcctggaaatgaacattgtcttctgtttcttttagtttgatttttttttttttttttttttagattccacttgtaagtgagatcatgtggtatttgtctttctacacctggcttatttcacttaacataatttcctccgggttcatacatgttgttgcaaatgaaaggctattcatagtcttaaaggcttaatactattccattagacacttgggttgattccatattttggctcttctatacctaaatcaccagattagaatgaataatttatccctggtggctccaaagatctcttccaaaaaaaaaaaaaaaaaaaaaaaaaaaggtttgaaaataacaggataggtgatctgatatttatggcagcataacaactcacaccaaaatgtagtggcttaaaacagcacctatttattatttctcctaattcttcaacgtaggcagtgccctttgggtatttcttttctctatgtggcatcaactggagcactcatttgtctgtcttcagctggcattgagatgggtcacagagggctttatttgcatgcctggtgccccatgcttcttcatgtggcctcttcacatggacagatcaagtttccttaaaacatgatcacctcaaggtcattgtacttcttatataattgttgtcttctcagaatgtgtgctctaaaaagtcaagctctgacatgcaagcacttctcaaaaccttacttgcagtactcttactattgtcccatttgtgatagaaagtcacgtggccaaacccagaggcagtatgattggagactacagaaaagcatgtgtttcaatggtgaccaccaacaggaattttttttttctcataaatactttccaaaaagaaaaggttatcgtgggaagtagtactttttcaaatagtggaaacattcaagcagaggctgggtaatagcttacaggatatattgtagaagtgatttttacattgaggtgaataaaatgacctctgtgatcataagactctagatcaaagctgactccaaatttgagtctacctaacagggaaaatagtgctgctattaatactaatagaggtgtcaggcaggagtctcagattgagaaaagaatgataaatgtggataaattgctttttttaatatagaagaaagagataatcaagaaataatgacttttattttttgctgtcttaggttggatgttgatataactgaacttcacagctggattactcgctcagaagctgtgttgcagagtcctgaatttgcaatctttcggaaggaaggcaacttctcagacttaaaagaaaaagtcaatgtaggttatgcattaatttttatatctgtactcattttgtgctgcttgtaaactccgtgctttgttatctgtgattctactagttgatagattaatgcgatatgataaaatgctgtttaatatgtcttaaaaatatattttagatagcaagcaaaatcaaagtttagcctagagaaatctttctggattcttctgtgactgactagggatgcctttcataaacttgccttaacttacatattatttaactataaattaacaattttatgacattaattcatgttgattcctttcatatattgttcagttacctcaaggctaggccttagcaagcttgcacaattgtgtagagtagaatagagtaaaatagaatagaataatataatagataccatacttaggactatgtctatattctcactgttatcaaaaagttattctttatagtcatcaatccctgtcatatattataagatatttaaatttcccagatatttgtgtattaccttatctaaaaggtgtccagcctttctcagtatttacatgtggtagcagatgctttgttgttgttattcccttctgagatggtataattttgaccttcacaaataggaagttttattaatttaatataaagtgtttcatctttagggaaattgtcaaggctttaatttttcaacttcaacaattataaaacatgcatctttgtatatgattggcaacagtttgtaaaataatttctaacaggcagagtaaataaaatgggcaagctaaggaagcagtgattatgaatgaaaagtaattttatccatgggaagatcacatctaaatgtgtatattagctctgctttttctctccaggattcaaatcatgaagttcaaaatccattgtatttttacaaatacgacattacctcagttacaagctaatgtttgctgttggggttggaacttttggagatcaacaaaagatatatatatattctggaaaaaaaatctattttttaggctgcttgaaaaagggaagacaattttgtcaccagttcttcttagagttaactacttataaattggaaagctattttaaattacttattagctttataagacatgctgttgtcagcattataatagactattctaaattgtttcaagaaatgggaaatatgaaaactgaaagataatatataattgtagaaaattagctaaatgtcttttttcaagtatacttctttgaaggtaaattgtttgctgtgatttttgagggaaattctcttagtagtagaaaattaattagagaacattaaactctaattttcaaacatcatgttacatatttgaccactgaaagtatgaatcacctttagcattttattagctaattaaaaatgattattgatctgattctcacaggtttctgtctgatactctgtttctttatcttaagacagctttgatcaggcaggaaaattgagtttcagtatttcaggaatataaattttaaaagttcctgttatcatgtggttacctatgaacgatttgcattttatcaatagcgggagcatgacagactaaaagtgctcaaaaatgtacagtgttttataactggttttctgataccttgtgagtcccctttatcaacctgaactctcattttctgaaataacaacatcattcttaattgcctactaaaatgggacatgaaatgatttaccttgatgtttccctcaggctaaatacaatgtatatgtattaaaaatccttgagagaaatacataattacgatgatggatattcagtttaggtatccattaattttcttactacatcacctgtcggtttatataggttattttaaactcatggcaggctcgtgtcatgaacttgagtggtattaatccatttttaggctttcattaaaaatggctaaatattaccaactcttttttttttcacttgatttcttcatttactcctttcaaatgcttttagccagttagcatatcataggccattatcagttcaatttcacatattttaaaaaatgcaacttttaaacctaagcataattttttccttgtatattcaccatgtgttttattcatataattaacaaaatgcacttatttaaaagctgacttctgggggacctttctaatcaaaatgtccctggaccaccaatattgacattatctgggagcttgtcagaaatatagaatctcagaactagtaaatcaaaatttgcctttgaacattttccaggagtgattcctatgcacataaaggctcgagaatcaatattctaggacacaatcttgggctttacgtagcagttacctctcacattcttttagtatcactgcagttcagactttttagctgaattaacagattctaacaactcgaattttttccgtgagcacatggtaacgcaaattggtaatgaaacaaacaaaaaaaatagcctcctttgatcacaaggggatttgataaggtgtctgaaaatctggagcttctgtgaggttctcttgaaaccctccctatcaagtcgttatggtcatctggctttgggctcttcctcggatctgcacttgattaccctctttcagaatcaactttttaccaactcccgctggaaatcatcaagccagttaatgcttccaatttctcctatctctgttatctgtgtttactacccagagtataggtacctcgagtctatattttcttctatctttctctctctgctctattgcactttcttttccttgcttcacttcctctgctttcccacactctcactcggcaggctcaaacactttttcaagacaagccttctatatacttattctactcatacgtggaaaccaattttaccctcgaaaacagcactatgactcatccctcttttgtacccccactactttagaatgactgactccctcacctaacagagacaattccaaagatactgctctcttcatgtaaaaatacctctttccttgcagttaatgacttctggccatctcttatctaccattttatcatattttctcattgaagactttggcactaggttagtagattttttcaaccaatttgttctttcattcttagttatttcagcatccctgtgggctctcctgctatcactaaaagctgttgtttctctcatctcctcaattcagctacctgctgtcatgattgtatgtatgtagatgttgtcattgtcaggcattactccatttctttaataagattatttttttgagacggagtctcgctctgtcccaggcgggagtgcagtggcgcgatctcggctcactgcaagctctgcctcccgggttcacgccgttctcctgcctcagcctcctgagtagctgggactacaggcgcccgccaccacacccggctaagtttttgtatttttagtagagacggggtttcaccgtgttagccaggatggtctcgatctcctgacctcgtgatccgcccgcctcggcctcccaaagtgctgggattacaggcgtgagccaccgcgcccggcactaacaacatattttaacaaaaccagcagttcttcataagctttccgtgcatcctaagtatattttcaacttagtttctctcaacaattatttcaagcttttgtggggtacctaaactttccccatcattcacagtaaatgatttcatctcctactttagtcgaaataatatttctcaaattgtgggtatttgtgctcatagtatcttttttttttttttttttccacctgccttagtggaagaggctatccttcacctggttgaggctcatctctgggtgtgtgttctcagcagcatcactgactatgtattaagccacctggttccattcagctgtatatccagattgtcaaaaatctacatcccaggtctttatcattagcttttaaaccggttgtgttttcatcttttagaacgtgtcctctcctataaacatgcatgtgaatacttaacgtgccttatcttactcaatccctctgtagaactagaacctattaacctcttttccctcatgaaattctttcctcgcttggcttatgggatactgctttctcctgattaattctttcacattcttggccatttgttccaattcagtttttctttaatattgatattcttcagagtccttgtgtttcttctctggatatcctcattcattcccattcaaatagtgtctattttcaaatgaacccttctcccatatgtatctttagctcatctctttcttaaaacccagggtgatatatctgactgcctaatagacaattttaattgatgtttgcctgatatcttaaatctcattatttccccagacctcctttattctttctccttcctttcaccctgcaaacagcctaatccagaaacctgaaagtgaactgggtcacctagatttttcttctaccattcacaagtccaatctttgacaggttcaattaatcctgctcccttaacagctcttgaaaatgtccagttctctctattcccatcaccaaaaccctgattaaagctaatatcatggcttacttctatttaagatgacaatcctgtagctggtcttccctgctactaatgttatattcctttagaagtttccacatcacctctgccaaagcgaacatattaaaacctcagtatgatcttgttatgtctgtgtttataatcatttgagaaagataaaatcagctactgatagccaggagctggcttggcacttcagttaggctttggaactgctagatgttgccttggtacttgcagccagtctgatgttctctggttgaatataaataattgctagggatgccagcatcatacagggacacgctatggttgtgatgaatcaagataaaagcaagaccactttgtaatcatatcttaatacagtaaaaaagaatagcattgtccaaaccacgcctaatgaccaaatatccctcatcttcattaatgtgacacattatgcttctttactaaacacagctttagcctctctgcattcctcctgccatctagataaaaattttaggacactcaacatagaattaccctacttccttacaacatccaatcaaaacaaagccccacttccttgatgccccctatcatgtaacacaagcccacatcttaaaataagctttttctaacatactcttagagacagccccatagttccctgtgatgcgctgtctctctcgttgcagcgtgtaaatcaggttaactttgataacctacaaatatgttccagtggtctttgtctgaagagtgttgacaaagtccatgtcttcatattgccctcttaaagcctacaatgatctaatttttgtttacttgcacaaactaatttctagccattttcatttcaattccattgttggtttctagaaatcaggacttgaacgtgaagtggctttggttttatgtgtgtgtgttttgtttttggtgtccccatgcctaacacacaaaccaataaatgtttaactatatggatatgtgatttttttcagttctgcagttgcatttaagataggatctattaccaatatgaaggatagaacaacttctgaataaacatttgagtgaataagttactcttcagtcaaagggtaaaacttcattatagaatgttaaatgagtagattcttaattacttctaatgtcggagtaggactgatagagatccataacttattttcataatgttagagaagatacagaaagaggaggcttttaagaggtgctaataaagaaggaggaacagaggtctgaaagaggttttaatcaacttattgaggaatttgtgaacttccctgtgttgtattctttgcttcaaattattttacttttcttccttttattgaatattatataacttagttgccttttattttgcatttaggttacccattttagtatttataattcttcatgatctctaagaattttcatgagcccacaataatcactcatttctgatacattgatttactgatgccttttttagcttctgtatactttacttgaaattatgtgtactaaataatttagaatccgagtagtggcttctaaacatgtgatcatatattaagcatatattgagtaaagtatttagtattctatatgttaatagcataatttaaaaactgtatgttatgaaatatagatcctttcaagattaaaaatgtatatgcatgtagacacatatatgataaacagctctatagaaaaacacacatacagaaaagctggatgacttcatgaggacgaaatttaagagaaagataatattgtcaagggcagaggtatttttatgaacatggcaatttcgaggaggtaattgtagtttttatcagtactgaatgttgtaagaagcatttttcctaacaagaagaaaattaatgactttcttttctttttttttttttttttttttttcccgagacggagcctcgctctgtcacccaggctggagtgcagtggcgcaatcttggctcactgcaacttctgtctcccgggttcaagcgattctcctgcctcagcctcccgagtagctgggactacaggcacgtgccaccacgtccagctaattttttgtatttttagtagagacggggtttcaactgttggccaggatggtctccatctcctgaccttgtgatccacctgccttggcctcccaaagtgctgggattacaggcgtgagcccctgcgcccggccaaattaatgactttcacaaaataactttttgtacagtagtgaaggctgaagtctgactgtaggtatttggagtaatattgaaatactggaatttggactaatatggtaatattagtccaaatttcattgaagatgaaatatataaaagaaaatgaagactgtggttgaagagtattcagatgatacccttggtcttgaaaacatgggaaaggggtatatatacagtatgtatgtgtatgtacatatatgtacatacacacacatagagagaggaggtggaagatcagagccatgaaataaaaacagagaggtaagattctaccaagttttgactcatggattgtatatggtactctttcttttctacttaggtattggtttattaccagtatcaggacttgagctgaagaaaagatggatgtgcccaactccctaactaatatgcagtttctagaatactttgatttaatccatccttcctttactgagcttgcagcacctgtccccatgtactggttttatggccactttatataaagctattagagttcgttatgaatttgcactttaagagagcattgtgggtaaggggagagaccataatattgtatatggacgcgttacgctaaaatagagctcgccttattatgtacctataatgtaccagccactttcatggagacttgggatagagtagagaaggatatagataaggatacctgaccttatatagtttacattctagtgggaaagatggaaatgaagcaagactaatatgtaaagcatgtggaatgttagtgataagttccaaggagcagaataaaatgagagggtatgcatgtgcttgtagacagagtggcactaaaaggcctagctgaaaaagtggcatttgatgggggaaaatgtccaagtaagtaatttagggcctttttaggcatggggaaaaataaatgcacagccgtgtaacagcagcatgcctgtagcatcagggaaaaggtaagcgtgtggctgcagcagaaaaatcacgatgtttagcagcagaagaattcagaaaggttaaggaagttaattaagatcagaccatggtaaggacttgagcttttattcagctgtcagcgagttgagctgaatcctgttgtctctgtctgctgtgttgataatatataatcagagaacaaagggtgaaatataaagacctttagtatcctattttgaaacattcatacccctcagagatgatggggtactttgtctaatgtggtagtagtgagcaccatgataactcactttctggctatgttttgaggttagagccaacaggactttgtgatggattgaatgtgaggcttgagagagagaggggagtggaggattctgtttttggcctaaacaaaggaaaacacagattgaggcctaggacactccaaagtgcgagctcagggacatgattaggaacctgcaaaggagatggaggaaaggtgacctctgaagttggaggaaaactgtgttcaagtagtacgtgaagccaaattagcaaatacttctaagaagaaaaaggaatcctctcaatcaaatcatggtgataggtaaagtgagaactgaacatcagtcattgaatgcagtagcttgggggccaatggtgagactgataagagcagttttgatgggactgagtaagagaatagatgtgagagccagtttttgtttttgttttgaaccagtttttactttgcaagatagacctgtggaaggcctatgttcctctttgttgatacacagtcacttaaaatgaggacagttatcttcctttttcagcaaaatatatctctttagactttgtttttggtttttgtgcttttctgtgctttttaatgtatatttctgtgagttaatgggagacggtagaaattttaggaactactgatccaacctacctgaaaacagaagttcatatatttcatttgaggacgaacgtatgggtggccagatcccaggagaaatggcgattttcagtgatgtttatttacttaacctttttttttttttttttttaacactttttatatgtggttatttggacatttccacgaacaaggtactctcatcatctcttgtgtcaaaaatgtttccgtggccaggcacggtggctcacgcctgtaatctcagcactttgggaggtcgaggcgggtggatcatgaagtcaggagatcaagaccatcatggttgacaccatgaagcctcgtctctactaaaaatacaaaaaattagccgggcatggttgcgggcgcctgtagtcccagctactcaggaggctgaggaaggagaatggcgtgaacccgggaggcggagcttgcagtgagccaagattgcgccactgcactccagcctgggcgacagagcgagactccgtctcaaaaagaaaaaaaaaaaaagtttcctaaatttctttttaagattattgaagttacctttaagtagaatgagcacatatttcagtttgtcgggtatagtcttagcttatgtcaaaccatttttctcagcttaattattcctagctccccattttactataaaaactatctcattttgggaaataaatagcgagcttcctttaatcccctcagaagtcccacatggtaggtatctttattgctattttacataggaaatactgaggttcagaaaggtcgaagtactttattagggacagatagtaagcagtagagacagaactgataacagcagagcaaaaagggtgactgcaggcccttttgttgtagtatcttctttaacatctctttgttatactaaattttattatttttaatcaactatctacagctgtgtctgaaatgaaatgttttctgggctcttcactgtctcattcacactcttcaaggcatacttgtatgcatattcctcttcattttgcaatgttcctcttgaaagtaatgtgccctaacagaacccagatatcgtctgaacattgacaaatatgcagataccattgactgcttctttctggggtctatgtgtctctttatgcaccagttattcagtttatttgagctgtatacagagttggtaatcagcctatagactgtcagagaccattctgagtgacccggcattccttgtgatatcttgttggccctgctgaattaatagttaaatatgttgaacatccctaatacatccaaactataagctctgtttgctctgatatatattctgatacgctcacacctttttgaataatatccattgaaatacccctagcaacagcagagcatgtctgaaagaaagctgaaattataagtagaagagcagggttctaatattgaatctaaaacttcctaatatgatgacctttgatatacgatttaatcttactgatgctcagttttctcttgtataaaatggtatacaacaatgctgatttcttctttcttacaattattatgacatacatatggaaattatgtacataaactataatttggtagtataaggaatcttattttcaatgtggctattgcattgttttcaaaattttcacaaacctctctgtgcctcacttccctcctctgtcaaaatgggaaagtaatagtacctactttatagattattgtttttgttgtagttgtggtggttgttactgagactatttatattagaataactggaacaatgtggttaacaagatattaaaggtcaaatatgattcctgagatattcaaatataagttttgttctctgttagtaatattaattgattctagtaagcttagaataaagagattatgatgataacatttagagggctattgataatttattttcaatatttataaagaccacatagtgttctcattctactttttatatcatttcacaaaaactaaagcaaaagctcaatgtagataaaatagaaacccctctgataggagaagataactctaaaagtaactcaaagaacatcactttactcagcttgttgtcattgttcctttatgtgttgtattgtggtatatattttttctttcatctgtatattgttttctggataaagttcaaattctggacaccccaaatcctcctgtctttcttgatatttacattacatatttacttaaatgtgcttattttttctcctctaagatgctcagggtgctttccatataacatttaccttttaatggagaataaatgtaagtagtgaaaaacaagtatgccataagctgctaaggacagataacttagatcacaaaaactaataagttgagaaaatagaaatattggagcttcatctaggatcttacttttaactagatgttgtagctactctattttcatggacttttcagttcaaccaacaaattagaaccatccatgattgtgcacgttcctggaaacaattcaatactgtctttgtgaaactgaatttcaagacaactcagaagttttacctgctaattggaaagggatcctgggaacataaaatcacaaaataccacaaactgggtgctttgaaattttcaagtggaatgtaagatattaaaaagtgtctgtcactttcagagtttcttaactaattagacaaaactgagttttcatttgttgcccttcagagcaccatgtaaaatgtgtatctttcagctaagagataggtatttaagaaaataaaacaaaattactaccttatagattttttttaaattttactcttaatttattctcagttttaattagtattttatatattacagctattcctgatggagtttattctgtgaatgattggcttttttttttttttttagcattttgtactcttgatattgaatccagtattcctaattcatgaaacctttttttgtgattttaatagactccatttttagagtaattataggttcacagcacaattgaacagaaggtacaaaaatttcccatataacccggctcccacagatacatagcctgccccactgtcaacatttcccactagagtggtatatttgtttcaacagatgaacttacattgacacatcattatctcccaaagttcatagtttatacattagctttccctattggtgccacacattctgtgagtttaaacaaatttacaatgacatgtatttatctttagagtgttatgcggtgtaatttcactgccataaaaatcctcaatacttttcccgttcatctacacttctctcctaatctctagaaaccactgattgttttgtagtttacatagttttaccttttccagactatcatatattcggaattggaatctagggtgaaatcctgcggtaaaatatatagccttttcagattatcttctttaacttagtaacatgcatttaagttcttccatgtctttttatggcttgatagctcatttttaagcactgaataatattccattgtctggatgtctcacagtttatttatccattcatctactgaagaacatcttgattgtttccaagtcttggcaaatacaaacaaagctgctgcagcattcatgtgcaggaatttgagtggacatatgactcctttgtgtaaatgcctaagtgcatgattgctggatcatatagtagaatgtttacttttgtaagaaacctccaaactgtcttccaaagtggctgtgccattttgcattgccaccagaaatgaatgagagttcccattgccccatttctctgtcggcttttggttttgtcagtgttcttggattttggccattctaataggtgtgtagtggtatctcattgtttaatttgtaattccctggtaacatatgatgtgaaacatattttcatttgcttatttgccatctgtatacttcctttggtgaggtgtctgttaaggatttttgcccatgttttagtttgtttgtttttgttactgagttttaagagttctttgtgtatttcggataagaattctctaccagatatgtctttcgtaaatattttctttgagcctgtggcttttcttttcgttcttttggcagcatctttcacagagcagaaccttttaacttagtactattcaacttattaattctttctttcatggatcatccctttggtggtgtatctaaaaaactatcaacaaactcaaagtcacctctgttttctccactgctatctgctaggagttttatagttttacattttactctagagtctgtgattgattcattattaattaactttatgaattatatgaacaccacaattactttcaagcagttacacaaatttctaaattcagtggaaatgtatttatttttggtatgtttatttttcatttttattttattttttataatttcaacttttggattcaagagtaaatgtgcaggtttgttacgtgtgtatattgtgtgacactgaggtttggtgctgagcatagtatccaatagctactattttggaccttttcccctcactccctccccactctagtagtccgcagtgtttcttgttcccatctttatatccatgtgtatccaagaaaacatggttttcaaccataatgctgtgttccacaaaaatatatgttcatgttattttattttatttatttatttttgagacagagtcttactctgtcacccaggctggagtgcaatggtgtgatctcggctcactgcaacctctgcctcccgggttcaagggattttcctgcctcagcctccagagtagctgggattataggtgcctgccaccatgcccagataattatgtttgtatttttagtagagacagggtttcaccatgttggccaggctggtctcgaactcccgacctcaggtgatccacccgcgttggccccccaaagtgctgggattacaggtgtgagccactgcacccagcccatgttatcatttgtacagatatattcaatgttgaaattttaaagtgaatttgtgataaaattcacaataatgtcagatatttcaccatcaaaagtataaacttccaatgaagttgatccagtgaataacatgaaagtaaataaattggaattaaataattgtaattaaaacaaaagaagggtgtaaggtttatgcctagataaacttttttgcatgtagatgttgtgttgttcaggaccatttgtttaaagactttttctccactgtattgccttggttcctttgccaaaaatcaattgattatatttatgtggatctgtttctgagctttctattctgttccattgatttacctgtctgttcttttgccaatattactctgtcttgattactgcagttttatatcaagccttgaagtcagatatcgtcaggtctcccacttaggaaactctttaaaataaatttttaagaaaacctttattcaggccaggcacggtggctcacacctgtaatccccccgccccaccccagcactgagctgggcggatgatgaggtcaggagtttgagaccagcctggccaacatggtgaaaccctgtctctactaaaaatacaaaaattagctgggcgtggtggtgcacgcctgtaatcccggctactcgggaggctgaagcaggagagttgcttgaacccgggaggcagaggttgcagtgagctgagatcatgccactgcactccagcctgggcgacagagtgagactctgtctcaaagagaaacaaaaacaaaaagctttacatttgtagctatttctttaaattagatagtcttttcagatacataaaaatatgtggattattgtataagcatttacataatttaatgtgcttagtaaatagtgttgtctagatgattactttttctctgcaactatttctgatattgccatattatatgaaagagtttccctctgtcgcccaggctggagtacagtggcgcaatgatagttcgttgcagcctactcagactactgtgctcaagcagtccttctgcctcagattcctgagtagctgggactacaggctcctgtcaccacgcctgactaattttttaaaattgtttgtttagagatggaggtctctcgattttgcctaggctgatctcaaatccctggactgaagcagtcttcctgcccaggccttctgagtagctcggattacaggcctatctcttaactatttgcttttaaaggaatgtattagatctgcgctgtacaatcacagttaacactggtcacatgtaacctttaaattttaaattatttaaaataaataaaattagattaaattaaatattcttttattttcaagtcatgctgaccacctttcaagtgctgaatacccacatgtggttattggctatcatattggatgacacagatacagatcatttccatccctgcacaaatttatactcaacagtggtgcagactgtccatgtatctgttatttgccctcccatctgtactccagtattttacctggaaatatttttttaaatgcctgtggatgtaaatgaagtcttaaaaaatagtctcatgtagaataaccttctgcctcaaattcaagagaaatctttgttataatatgattgttaagtcacaggtgtgttgttcttactatattttaattgcgttatagttatttgaatagttatgttttaggacatacacattgttatagtcaacacttcttgatgattatagtaatgtagttctactctgtcatagtttaaaatttatgtctccataggaatattattagctaaactcaatagtatgaaattctggctattgttaactgaaataattttgcatttgtggttcaaaatgtaactcttaagggaaataaaggaattcagaaagttttttgaaactcaatcttgtcttccttggaaataggagtactttgattatttttgaaagaaaaattagcctacagcctggtatttaaatatatatgtacatatattatatatttctgctaaattatttatggtagtttattttttccatcttatatacatactggattctcaatttgatttttaataccgcctatatacttattagtaatttcaatggtgtatctttaaaagataaatttcattttagttatgtgacactttatctttcattgttatgaattgcctttttactttttgcagtcttgcgttgaaatgtatcagaaactataatgtaaaaaaaagctgagtagaaatcttataattaaaagttgtagcaagtcatgaaaatggctcatgcttttattgccattttgatgtttttgatggcaaaagtgttgagaaaaagtctttagattcacgtgataagctgacagagtgaaacatcttaaggcttgaaagggcaagtagaagttataattattgtgtagattcacagtccttgtattgaattactcatctttgctctcatgctgcaggccatagagcgagaaaaagctgagaagttcagaaaactgcaagatgccagcagatcagctcaggccctggtggaacagatggtgaatggtaattacacgagttgatttagataatcttcttagggatttgataaacacataggttcatatttatcagctgaattatatcagacaagcacttgttaaatacaaatttaaattaaaaggtgtttgtatgttttttattattctttttttaatgctaaggaaattattaggagaaattcaactttgagttcattggaagaaaatgggatgtggtagaatattttatcagtctgtagcagagaaataaattttaatgcaaatctgctagaatttatccaaataatttaagaaaataaggttaacagaaatttgaaaacattaacagtcatgttatatgtgtaaaactgatcatcatctgattttaaatcatttttgcaatatgtttttccaaacactaaaattatatggaatgttttaccgtcattcctgttttgtaataatatatatgacattttctgtgttactttttatcacttcctctcatttaaaaaagaagtctcttcgggataacctttacttttaagtaacttttttagagtgagataaaagcacaaagctagccaagtttttgtctttctttttcaagaataaattaaaattaatcttttctaatactcagtgcctcaaaagttatgtgtaccaaatgtgtcattgacatgatatgtaaacaaccttctttcaaattatcattgctatactactatatttccagataaaattttacgaaaatcagggataatgctatttccaaataagattatttttcattttgtagaagacgtttacaagaacatcataaataaatacaacaaatgtttttgttgtgcatgtcagcttttttcagaatctgcctgcattttggggcataaattctgtgtataagttattttttgccttaattgcaaatttggcattcaaaagttcagtggtcttcctagaaaatcaattcattttcttcttctaatgagtcccatgactgactgtatttggttaaaaatgaaaacaaacaaatataacaggtgagacttgagtgaacaagtttaagaacaggtaatgaaaataccagtagatttttatttagatgtatgttgcttggtaattttaactgatcaacttaacagcatattcatgttaaataaaattatgtgatctaaaaatattctcctagttgttatgtaagttccccctagaaactgtattatcactttttcattttaataagctgatgcaagagctatactttaaatggtctcatgtcatagttatatatcaagcttacctacactgaattaatcagaaataatttaaacatttagaaattacgggaatgatttttaatttttggtaagtaaaactacatgcaggatttaaatgatcgtgtgactagtgagaatattaattttcttgattatttccctcatagttctaatttttggaggcatgtagaaaagtcaggacacatagtaggtgcttagtaaatattaattgaccagattctgtttagaaaagcaaaattaaggcagtcgttgaggtaataacgttggtaattttggtgtgaaaataataatccatctgaaggaaaatgctaactttggcagataccagggaacactggggggtaggggtgtgatttgagacattcctgtttggttgactgtgttaatcaaattttatgctacccttttgttctaccagtaaagatatggtcgaactgatacgtcattaggctcaagtttgggccataactaggatgactacttaaaatgaccatagctctgtttccccattaaataaaataatttatgaaattacttaaaggctcaaatattctaacttatctatttgttccgtttttgtcgttcaaggaacaaattgcataatatttattttctgtgattgtgcaaattgtgagataagctagacacatattaagtgcctgaagtaccccttcaggtgtatttcagagggactgctaccctaaatcataatagctcctttagtatagagcccaaaagtacagttgagtggtgtagctcatgaagctgaaagacaaatgaagctttctgtaaactaggagtccagcaattattgcattaaagctcttaaatttataagtccagaatcttccttcccaagcttaggctatggagatataataaatctcacaaccacgtaagacacatacattcttgccctttttgtatagaaaggaaaatgagagctgaatcagtgtgcttcatttaggacctcatgtaaatggctgttcctcttaaccacgtatagtttcctcagaagttaagataaagatgaaccactcttgtataaaccactcatattattatgccactaataaaaatatgtgcgtatatatttataaatttgatgtgtgcttaccacagtgaaaatatttaacatatattcatagtgtaaaaatatgtagaatagcataagtatagctattatagattttaaaaaattctgtgaactatattttatatgtatctatactggtatatgcatagcaaactgaattttctacttaaaataatttgccctaagattaaactactttttaaaaatttagaataattttgtaattcatcagtttgcttttagaatgaaattccaagatggaaaaaataatttctcataacttaaattttacttcagttttgacctgaaatggtacatcagacatatttccaaatgatttctgtccgtttctaaatgtctatgaagcattgaagattcaacatcacttaagtaatgcagaaaacaaaatctgtttgtcctgaaggcaatttgttgaaggaatttaagacatatgctgagaagacaggatagggtgttaaggttgttgaaagtacaaaatttaccatggttacaatgtagaagggaacctcatttgatggtgcaaagtattgttaaaaatcagttgtacgttctagaaacagtatgtctagtaacatatgtacagtttttcagtgtcacatacaagttttatgatcaattggaagatactttttattttcactgtattttatcaaatgtgaagagttgtatgcagaattttaaaacagttaatattaaccatatcattaattttacagcaataatttgtatattaagagtttattgaccgtaagagattcttactaatttatttggaatttttaaccaaagaaatgagttggccaaattccttgcctgctttaaaactatacatggacgttttccttatggatgttccagttcttttggtcagagtagaagtgatctttcacgatcatagactaaaaagagaagctactaaaaggagagtgttaactaaaaaaaaaaatcacgtttctggcattttggcatgaaattttggtataatttttaactgatttatctctatcttagctgtattttttgtttgaactaacattaaaattaatttactgttcttatgtcagcattaattggttggataaatgtgacagaatattggatggtgcaaagtacctctttttactagagacatttttggatagctgtaattttcatgcagcttaccgtcaatatgtaagctttggatcataaccctggtctcaggaaactgttaacttaatgagggcaagtgagaggctagaccaggtatctagtgatgtatttatatattcatgtagctgtgcatattgaaaagggagtttccaaattctttattttactttttaagaaagatgtgatataactttaaggtttatttttacatttcttaatttaaatacaaaatgttataaataatttagaaatttagaaaaatttagccattaaatatagtaagtaatctttctaatgctttaataatattgctaactaataatggttttctaagattttaatttgaacagtctttaaactgatgcctttcatgaccaaggcctttcagtgtattattgagattgtggagttttaggacaacctagggctaaaataatatacatatgattatacctaaacatatgtctgtttttatctatttaggattagacgtaatcctttttgtaaaacagtgttctcgcatgagtacatacagtctcatcaatcaggcataacacaaaaaagcctagtttagataaactggttttccatattaatactgaaattaccaaaagatgaccatatcaaaacatttatttgaaaacatatgtaggcgtagctcaggttctcgttctttagtctctaagatcctttcaccataatttctagaggagatactataattatgtaatagggttagttaaattgtgattcattttcaatttctatttgtagttttctgtgtgttaattaagagtctaaggacagtcacatcaaggacatgtttaaataaaagtagtaattattagtatattagactaaagaacatctcaaaactatcattccctgagtgctagattatagtgtttaaggtgatacctgataataagtatgctaactgttgtaattaaatggcacagaatgataacactgacgagagctcttcttatccataacattaaccaagtaactatctttttttcttgtattttggttcatagctcattagataatttcacatgaattatgttatttgaggtgggcaaccagattttgtcagatgggtgagggtagggattatggtcagtctggctcatctcaaagctaaaactctcatgatcactggaaaaactttcagtagcagcaagtcttctaatcatatattttaatggcaagacatattgcaaatagtctgtatacaaatgtggcatggagactgtaccacttgtagtagcccagccccttcatcatgaatgagtagccttccacagttgcatatatttcctcttctcttattccttcctcagtactgggcagtttgatttatatttcttctttctccacatgacacttagtataatgctctacacagagttcacattcaataaatgtttttaattgacaggcacatttttcttcgtttaagtctaatctccaaaaggaagagcctctgtgggtgtgtgtgagcacggcgtgcatgcacgggtgaactcgcatgcgcagacatgtgcgtgtgtgtgtccatgtgtgtgaaagaaagagactgttgttgtcactgttgttgtgggaaatgagtggccaaaacaaatatgagtaaaaatctgactttttttaattttatgatgtttgaaaataaaaacgcaaaagggctatattagtaaaatttatattgccctcactaggggtattacttttatatatactattaatttttaaaagctattactttaagtcagtgtggtcacagaaacctctaaaatttagcctcagaacttgtcttcacaggttttgaatatctctatattacattttagactattacattgaatgctaaatggacttgtaataaccctcacttaaagttcagcaaaaataggagactgtttattagcagctttattttaagtttctattccaaatattcttttaattcaagagctctggaaacacttgttttgtgttattctaccctggcttcatggctaatgatgaatatacttgatgaggaatacttcactttaagtggcagttctgaagtacttgcatggaaggtggtgcacatttaacattattctaacagtctgttatgcactgtacacaagtaataaaattaatggatacacttcaagtaatgatccatttcctctgggtgcaatatatttattcacagactatttcaggggttgtttagaatatgagatgtgaatggattatgatccattatccctgagattctaatgtgctacaacaaaatggtttccataagtattgctcataatgcctggtgtgttagtatttgtattcttaaatagctaacacaaaattagaaaacagatgctcagatgattgatacttaaaacttttcagatatttacacttacaaactcttagaaaagttaaaattttccattgagtcaaggagcataattctatggaatacatataaaacaattatatataataataaaatccatatgcaaatatttacttggataacgctttgaaccctttttcattctagaaaggttttaatggactttcttagaaaatcaacagtagttctggcatttagatggtcaattaattcataaagttgaagtaatagcatttctcattttaattgaagagaggtacattaagtaatgtgacagtgtcggttattaacgtgacagtgtcagtaagtaacgtgaccatcctctccatcccctgcccaagtattttaaagcaaatttgatacaagagagattgtgtgcttgtttgtgtatggcttttggcttcagtgtacattggtctcataatttttatattcatatagagtacactattgatttggtattgaatgagttcatgagtacagtgtagttatactctttctactccaagctgagaattctattagatactgccagtggagacatttcctataggagtttatagtttagaaggacagtttatgcccttgttgagcaggcagcatattcacaatgaattaatacaatgtttgcatacaaatccttcatagcaagacttctgattttctgtgcccaacattatgtcttttctagtaacatctagaaatttccacgttttttttgaaatgttttcgtttctttataacttcaatctcacatgattataaatgtggcagaatattccaggattcccaaataaactctttttatttttattttagttggtgacaggctcttgctctgttgcccaggctagaatacagtgatgcaatcatagctcagtgcagcctcgaactcctggtctcaaaggatccctggttattgataaaacttctttaaaaaatgtataaatacaccttctatatcccatattagtcatatattatataaaattaggactaattttaaaatagtattattaactttttatacatgtcctgtttcagtcattaagaagacttcctctccccctaattttcacacaagagagctggtcccttgttttctgaatattctttttcatttcctctatatggcattgtctaatatgtctttgttgcctagtatgtgtcagcatttgttataagtaagttatatatgttaactcagaactttggtaagtatcctatgaggtcgattctatttttaatcctcatttcatggatgagaaaaacaagatccagtgaaattaagtaactgaacccatttcacacatctagtaaggggcatcaaatttgaactccggtctctttaacgccagaattctcaccggtcatttctctgcctttctgcctgcctccccctttttgctattatagatgtcgttcttttacctatcactgcattttcattgcctgcattcagttataaagatcaatatgcaaataaatagagcgtattataaatttcagtgttatgaatttgtacaaagctgacttttcttcaccatttaaatttcttttacagtgatatattgcaacattttttggggggcaaaacatagagttttgtgtaatgatcaacaatgactcattaaaacctgtccctagattttaacggatactgcagagcctattggtacttcactgtagttttatcatttaacaaaattaacatatccatattgaaaatcaacttatagtttcattttttcatttgctacgatttgtatggttgacctttctcagggacacaaagtgatttctctctgtgttcccgtctcatttagacaaatgttgaataagactcaatccagcatcagtctatcggtccctttaatttagcatttcttttttgcctgtttaatacctggttcatgttgacgtttcacccttcatggacttctaactgcttgttcaagttcaacatatgctgaaaatatttctcctaaatatctgatcatttagatccatgccacattttttgttattaacataatttaaaaattctgtccagtatattttctaattatctttttattttccagaaatgttaacgttttatcataatacttttttcaaacggagtgctcatacgattgaagtttcatattcttctcttacactttataccaaatgtggtcattttataacaacagttacttaatcgcatcgcttaacaaatattttggtacaatttttgatcactcctcaaaatctaacgatcaaaaacagcatgtcacaattgcttccttaagcattaggaggatattagaatatgtagctcctgtaggccacggacttcttttatacttagatatatggagccatgtatatattctttttacattctattatttccattgtatctcattaaaaatatatcagggaagaaggaggggaaaatagttgacgataatatttgcaaagtttgtctccttcaccgccatcctgagtagcattatgctttgaaattagtgaagttacagttgtgtttcaaatgaattgagggacatggtttggcagcattaatatcattatgacaaatagaacattagactatcagggcagagggaagtgaaagaggataaaataatatagttgttgaattcacatctatattttttttagtctttaaaaaggataaagtgggaggcatgtgcaagttagcaaaaccacaggccttatgtttctagagacgttcttcagactttttaagaacttagcttccctttaactaaattatattaccagaaaattaagtaaaatgaacatttataaaagtagattatcttaggcaacctactcttctaccaaactactcttcgaacttttaggtattttaacctagagaaagaaccttacagtgagtttatgttcttttgagatctctgtaggtacatgagggaacataaaacatttaaatattcagtatttccaaagtataagaaagttatcagtgctaatgtagctatgtttaaaaatgcatgatatcatatgtaatatattttctcttttatattctgtcattaagaaaactatataagctaataaatctaagaaagtctaaattttgtaaactaactttagagagtttgaatattttaacccatagcacagcgtgatgttgccatgctttcatgctatgtatggaataatatgtacttggactggcgttcgtcatatatgaaatgacatagcatattccatggtacatagtaggtactccagaatggtaatggtgataatgatatgcttgtgtttccatttttcccttgataaagttttctgggtttggtattactacagatgattttaaaactttgagatcaacttctacatttataaatttaaaaatgtttcacattagaaagattatttttcctagtacttgtttttcttcctcgcatccatggacaatatgagacagagtctcgctctgtcacccaggctggagtgcagtggcgcgatctccgctcactgcaagctccgcctcccgggttcacgccattctcctgcctcagcctcccgagtagctggaaccccaggcgcccgccaccacgcccggctaattttttgtatttttagtagagacggggtttcaccgtgttagccaggatggtcttgatctcccgatgccgtgatcccccacctcggcctcccaaagtgttggaattataggcatgagccaccgtgcccagccgacaatctgtttatttctaatcttctgtaaatgaaataaagaataatcttggattttttttcctctttttaaaactatgaaaatactatttaaactaatttccaagcccatttttaaaattaaaaatgtaagttagtttggggaagtatatttgagtaatatgtatgatatgtaaaatgtatctgaaaacatccaaaatgttacttgttcatgcagccttccagctcccatcagagctttgagcacttttgtttttatttaagtttttatttaatattttatttacatatattctaattttctacatcttatgtcttattacttgatggcattgatattcattgttgtgacgcaagtctgataattcacattgaataatctgaaatcatatttacacatttatatcttagaaaataattgatctggtttgaaatcattcatgtggtgaatacttttataattaggatgtgttggctttcagatcatttctttcagtctgtgggttcaggggatatatttaattatttttttctttctagagggtgttaatgcagatagcatcaaacaagcctcagaacaactgaacagccggtggatcgaattctgccagttgctaagtgagagacttaactggctggagtatcagaacaacatcatcgctttctataatcagctacaacaattggagcagatgacaactactgctgaaaactggttgaaaatccaacccaccaccccatcagagccaacagcaattaaaagtcagttaaaaatttgtaaggtaagaatctcttctccttccatttggagcataatcaataggtatttcttggcaatttccaagaagacagtaacaaattatttagtaatgaaacgttcaccttctaaggatttagctaagcgcaataaagttcaaaatgtaagcaacagaaatctgtttaaatatgtaagacgtagatacccggattctaaaattgtatttggcgtagttacacagcgctaattgattgtgtcggtttgcgtaagcatgaggcagtttaggagtgtggaaaccacatgtatcctgtaaaaaatggcctctcactttggaactctttctttgtgacgagtgaaacatagtcattttgaaaaagtggaatccatggaaatagttagaaacacgggtcaacaacaagcttggatgcagtataactagatacataaggaaaatatttaaaactgatggacctctcaaattacgataatttgaggaaggtttctttacaaaaagatatttttaaaatgtagctggagtacagaggaaccacaccggatagtgtagtaacccagcatcagagttcttaccccttttagtccagaaaggatcagtgagagagcagttatagaaactcagaaggagacagtcagatcctcatggtaaaagcagcatggccggcttaaggaatcctcatagaaatggagtcagacaaataaacaccccacttcacttttttccctgcctccagaatcttgtcagggctcctcactgactaaacttaatcgtaagacaaaggacaaggaaccgtcatctgtaaatatcagtctcctgggtaacaggagaagagcggacagtggatctggaggggcaaacaagatgtaagtggacaaaagggcctgagaaagagatgaaaggattatgccttcaagtgtaagaaaacaagagctgtataataatgaaaatagcctaaactgttttcattgttactatgagctatgtgcttttcgcggggaatgagaaactgattagaggatggactaaaacgtttccaggatgaacgtttagtgatagatcgagatgattacatttaatacaaaaggcaaggagtggagattcatttgcatactgtaaaaaagaatggcttaaataaaggtagaatagacatggaaaggtgacaaggttgatttagaaaaggtattggacccaaaaagtgatgagaaattcaaagctattttgaagagaaaaacaattgaaggacttaatggttcttcaaatatcggacctgtagcattattaggttttctgttcttgtgttagtttgctgaggaaataaactcagaaagtatacttttggataaagaataccttggataaggcacttgacttgttaggcaaatacacacatctaaggaatttctacattgagatgcattttgtaatttaagaatagaaccaatgccgcttttcctgtgaatcagaggaataatccaaatacattatttcttgccacaaaaatctgatgttaccttatccgattcttgagattcagatatagtagttagtaatagtacctacacagtacattcatgcataaaatatatacattaagtgtctctaatgtgtttaagaatgctactgagtgtattaatcagctgagtctgccacaataaataccacagactcggtggcttaaacaacacaggtttattttctgagagttctagaagtgagagaaagtccaggatcaaggtttggtagggttcagcttcatcttctggtgaaggctgtcttcctggcttgcagataaccaacttctcactctgtcctcacatggctttcctctgtgtgtatacatgcagagagagagaatgagggctatttttctttctctctctctttatctctgcctccttttataaagccaccaatccctaagggattagccccccaccccgccacccttacccaaccctgatgacgtcatataaacatcattacctcttaaaagtcctatcaccaaatagtctcaccaatggttaggacttcaacatgtgaattttggaagacacaattcagcccatagcactaagttttgggaatattagagtgggcattcatggactctgcttttattgtatttacggaaagcagagaagagagatatgaaacaatggaatcaatatttttaaatttcctgctaggaacagtggtttaaactaagatgcaaagctttgggagaatgagtaacagggaaaaacgaacctgatacagccaccaagggcatcttccttgagggaggaacatttgagttgagacttttgtgataagttagaattaggtaagagaacagttaagcaagattccaggcagaaggaacatggcaagagggagcaataaaggccaagcacctgaatgaagaccattgtaaatgctgaacatagaggggcagatgaatgagaggagagacaaacaggaatcagtcaggtatataggagacaaaccaatgacttctgggacctgctagtatcttggtcttgatttgaggaacaaatggagatcaccagaggttttatatattaaatattgtctggaggttgaggaagtcatcctaagggaaaatacttctcttactgcatccaaattccgttgtcacctccttatcaccccttactctttctctcagacccattggtgtctattaatttgaagaatcactttaggtaaaatatttagcaagataagcttaatattattcatacaagggcaaatatatatactgttctgctgagattagtgataggtaaataaattataacatgtttctcagcgttttattttatttggagaagttttataacattagagcgcatatttagctcatattctaatgatcggcagaactggtttttaatattgtgggggttagagagccttatcagaattggaaaaaattcatgaaccctttcctgtgaaaaatacaaaagcttccatgagataagcatataattttaaagaataaacagactcaaaggagataccatactctggaggaccaactaaaccaaatccttttatggaaataatggctaattgttcacatctttttaaacacagaatacttcagttgaaaagtatctcttctatgatttattctcagaacattaaggtctcaactgaacatttgcccaaatgttttattagtttcaaagtcccctttgtttttcagagcacacttggctataatgttggctctttctatagccccctgaacgggaaaaatggcagccctccatctggccaaatataaatcaggttcttaatggttcacagtagatgccaatgctgccatttgtaaatctagcatacaaattatttgtatatatttctgtactataaatacagaatattaccctttacctcttgtcttatttcttatccatggatatataccaactttctagcactggtttgagaggatttatatttgaaagagaaatataggtcaccttccattttgctaaacgtctttaatcttcacccaccaaaacgattgaatcgtcagagattattttacctgaatcagctcataccattataaccacataaacacattcctctgaaagctgtatttatgtttttttaatgagaataagtggcattgtacattagtcttgcaaccatgacagaatttatgtgataaatttctcagcctctcctaatacaaaagttactctctcccaaagagtatgaatgcctccataaatattaactttttttttgccttttcactttgattttcaggaagctcagatttcaattcgttcagaattggtataattctttccattttctctttcttctaatgggctcatgttccaatttttaaatttcaattttcctgttgttacatattaaatagtaactaaccctcaagtatttttttctaaagacagcatatatatgaattgtaagtaagcagccatgataataacacttttaaaaagggcagtgaaaactttgagttcaaattatatatgtattaaatacgaaacaattccaacttcactggaaacaagaacatgaaaacatttatgtagagaatagcatgcccttcgcccactttttgatggggttgtttgtttttttcttgtaaatttttttgagttcgttgtagattctggatattagccctttgtcagatgagtaggttgcaaaaattttctcccattttgtaggttgcctgttcactctgatggtagtttcttttgctgtgcagaagctctttagtttaattagatcccatttgtcaatttgtcttttgttgccattgcttttggtgttttggacatgaagtccttgcccatgcctatgccctgaatggtattgcctaggttttcttctagggtttttatggttttaggtctaacgtttaaatctttaatccatcttgaattgatttttgtataagttgtaaggaagggatccagtttcagctttctacatatggctagccagttttcccagcaccatttattaaatagggaatcctttccccattgcttgtttttgtcaggtttgtcaaagatcagatagttgtaggtatgcggcgttatttctgagggctctgttctgttccattgatctatatctctgttttggtaccagtaccatgctgttttggttactgtagccttgtagtatagtttgaagtcaggtagtgtgatgcctccagctttgtcctgttggcttaggattgacttggcgatgcgggctcttttttggttccatatgaactttaaagtagttttttccaattctgtgaagaaagtcattgtccaaaagaaatacagtgctagccacaaattcaagccacatatgtaatttaaaatggtctagaaactatattaggaaaggaaaaagaaacggtaattgaatttcaatagtacattttatttaacctgattcatcaaaaatattatttgaaagtgtaatcagtatttaaaaactttgagattatgttcttagcttttcttaatcttcagaattaaacatattttggtaatttcatgcatctaaatttggaccagccacatttcaggtgcccagttgccacatgagctagtgacagtacagcagtgttcatgtgattttatcatacaaaccagggtactactgagagtgaaacagggtgctactaataattatgccaggacaacaagaggaaacctggacagccaccgtaatttaaaaagtggcaattggctgggcgcggtggctcacacctgtaatcccagcactttgggaggccaaggtgggtggatcatgaggtcagcagtttgagaccagcctggccaacagtgaaactccatctctactaaaaataaaaaaaatttgctggacacggtagcgggcacctgtaatcccagctactcaggaggctgaggcagaagaatcgcttgaacctggaatgtgaaggttgcatttggccaagatcgcgtcattgcactccagcctgggcaacaagagcgagactctgtcccaaaaaaaaaaaaaaaaaaaaaaaaaagcagtggttgcctgtttggtcaggagaagtaatgagaccatacaaaacatagaagattatagatatatttttatatttgggtgtgtacatacatatgtataagtattatatagattttatatgtgtgtatataatctatataattgtatcaaaatatatttataattatagtatacacatatacatatatgtaggtatatatgtaatttatattttgcagaaatgaaagagaaaatattgttcattgagtgagcttaaaatttgaagcaagcgcacatcattttgatataagaggggtgcagccaaacacctatatttgatttatggaaaggatttaaggtcatgcatagtatttttccactgtacgcattcatacccattaatgctctaaattatgtcatcttgaaatttaaatatcattatataggatgatacatattgaacaaagagccaaggtatccttaaatgtatggctggtgatagaggcttgtctatactgtcatggatgtttcttatcagatatttgtgaagggtattaagctaaacttgccttactgctttttaataccttcttttgcaaaatgtaatgtatgcaaagtaaacgtgttacttactttccatactctatggcacaggatgaagtcaaccggctatcagatcttcaacctcaaattgaacgattaaaaattcaaagcatagccctgaaagagaaaggacaaggacccatgttcctggatgcagactttgtggcctttacaaatcattttaagcaagtcttttctgatgtgcaggccagagagaaagagctacagacaagtaagtaaaaagcctaaaatggctaacttgacattttccaaaatggttatttgtggggaaatccagaaggtactaacatgaaacaataatttctgtaaatggaaccattctccctacaacctgtattaacaaggaacgaaatactggtgtaacagataagctgtctgtagatttttttgtcctcataataattttgtgactttgagaaacaaaacatgttttgtatgggaatagcttctccttgggggattgtagatttcaaaatcagatgttttgaatatagaagaaaataaaagagcagttgaggtcatatgaatacacttcaattaagtctggctcgctgtatatacaaggatatttgctaggcatcttctaatatttctgtcaatttatctgaagagtattatagctttagcatacatgtggcaactgaaactcagcaaaggacaaattattctttgggctacattttactactggatcactataattacataaatcctattttttcctttgatgataaaagataaaagtggagcaattatgcaaattcatgccatgcgactagcaaatttttcaagatgtttcttttgtctcttcctgaattgctttaataagatgatgttaatacatagtatctgctccaaaatatctctactcatcaacttagttttaagacaaaaattcttttcagagacagatgaatgaccacctttaagaaatagtaaatggggttttgattcactatatacatgcatatatgtgttcatgtgcacacaaaaggaattattgagtaaaatcgggtttgaaggcattaagataaaagtatttttctgaaaaaatctctgtcccaaatttgtcatgagaagcacaggaacatgtgtttgtttactactaaaacttaaattagttggaaaatatattatcctattgcttttctttgtaaatatttaaagaattcaccatataatatcatttccagaattaatgtagtgatacacaacgcttttctcatttcccagcttttcattttttacaaaaatgaaatgagctaaataaagcaaaggataaatactttttttttttttttttttttttgtacttcagagtcgtttttgctaaggggtttattttcctgtacaggtagtaaaactttataaatagtatcagctccctctagtggatttcagtatacttgttactgtgcctctgcaaaatcaatttgggaaaatattttaaatgtcctagattttcaaatattgacatatttaacaataatgtattttcacttgtcattacatacataactcccccttaaagttaaatacatttagtggctatgcagcaattgttgtgcaaaggagccatttcactggaaatttactttaatctgtatatacctcttaatcatattaaagttcaactttttatcatttactttaaagatgttcagaatagcaatgtttgataactgagatttgtctatgatgttacaatataaatacgtaataatatatagtctctattcatacagctctccatccatccatccatccctatcatctttcttctcttttttaaatttcatacctacaaacgatgattgtttataaaacttcctaactttttcactgctattatatgtaaacaaattgtccccacttccactgtagctacacatctttaattttactattcacccttttggaatgcttgtctagattaataaataaccctttaattaaatatggtgtatatatatatatatatatggaatgaaaaatgtagcatatgaaattacatagcagttgattttgttaatttgaaattaattcaaataattgcacatgtgtatgcattatatccgaactggcaccagggagtaaatctcatttcttgtattcctccacagtactttggacgtattaagtatgcaggaaataagagctaacagaagtgcctaggcatccatactgacttttatttcctctttacttttttaaacttgctttttcacacaaaaacctggcttttaaaatatactatcagtgttggaaaatggcataaggaattggtagttgttacctgacataagtgatagaagaaaataatataaaaagataaaattctattttcaaagcactttttactctatgcataactaatttatacatcattttacctaaccctcagagagaaacacattgagtatttgttattacaactatatcacaagtaagctaatggggtttgaataactaaaagcatggatatgggatgctgtaagaactagatcgtatacacgaatgtccataacaacattattcataatagccaaaacgtagaagaaacccacatgtccatccagtgatgactatatgaagaaaatgggcacatccatacaaggcagtgttactgagcaataaaaagggagaaagtactgatacatgctacagcatggagtacccttgaagacattatgctgagtgaaagaagccagtcacaaaagatcatatgttatatgagtctcttgatataaaatggccacaataggcaaatctgtacaggcagaaataagattagtggttgcctaggtctgggaggatgagggggtggaattgtttcccatgacagttgataaaatacttttctagagactgaaaaccagtaaactcatgttatatgctagatgaatatagaaacacagcatctagtctgttgtagataattgtttcaacaaagaaaaaaatgaaaccttatttcttaatgtaaagaaggaaaaagattggtcatataatttgagtttatttcattaacaatttggaaatcatgttaaaataattattagggattttattggtttggtttagttttgcaaaaatggagaaagtgacattattagttatgacaaagccagtgttttgactgttctaaagtttcaaaatgattctcttctgttctacaccattagattgctttcagaacagagtcttgctcactttttcactaataaattcaagaaatatttttgaacacctggtatatgccgtaaaagtgctgggcactaggtaatatacatggtggagaaaatcaagagcaatatgtcttcatggagcttattgaaagaaagataataaaattgaatatctgaatattattgcagattataattactttggcgtctgaaaccgtgattctggggagatgatgttagaaccaaacctggagaatgtgcaggtgccagctatatgataagttggagaaaggacattaggagaaatgaaaagaaacacaaattgccaaaggtgaagaatgagggcttggcatgtccagaagacataagggaggccagaaaggctggaatgtaacaaatcaatgaaagattaggacaagatgagggtagaattgctcttatagaacttctataacaggtttggattttaagagcagtagacatttccgaaagaatttcaattgaggaaattaagtacccttagttgtattttttcaaaactcaccctctagctggtatgtgaagaagaaatgcaatacaagtctgaggagaagcaggaagacttgtggaaagaatagccacacagaggagagtccattgaaccttaaactacagttgtgataagataaagaaaaatcatttcaacccttgaagaggtgatgatctggggaggtgtagcacagaagatattcttgccagaattgaaagaaaataacttttacctcttacagagacagtagaagaaaattttaagggtagccagcaaggatgctctccatggccacaatttcaagctctatggttagtctctacccctccctgttaggatgctgagactgggaattaaaacaaagtttgatgtgaggtaactcttctagctgcagttcaggaaattgacctaatttactttattaaaattttaaattttttattttaaaattttatttttaatacatctaggcaaaggaatgttttgttccagtagacacataatctgttgcattgctccttcactccagaaactaggtaaactgtttgtaaatgttccttttaaaaattgtgttatttttatcaataccatcaagagcaagcatagcagacatgtttatttaagcaagctatgtgcttattgtgagataaaagaattgttccctgacctcaagaatcatgggaaaactcgctaaatgccaagttaaagctatacatatatatatacacacgctgtgtgtacatatacgtatatgtacacaagttgtgtgtgcatatacgtatgtacatatatacacatactgtgtatgtacacacacagacacatactgtgtaaatactcacgtaggcaaatattgtgtatatacacacgtagacacatactgtgtatatacacacgtagacacattctgtgtatataaacacgtagacacatactgtgtatgtacacacgtagacacatactgtgtatgtacacacatagacacatactgtgtatatacacatgtagacatatacacacacacacacacacacacacacatttataaaatttatgtgacaggaacctcatactattttccaaaatggctgtactaatttacattcccaccaacaatgtgtaagtgtacttttctccacagcctctccaacatttatctttcatcattttgaaagtagccgttctaattttaacatgtgtaaggtgacacatcattgtggttttcacatttttctgatgtttagagatgttgagcattttttcacatatctgttggccattggtgcctcttattgcgagaaatgtctgttcatatcccttgcccatttttaaatcaggttatttgttttcttgctgttgagttttttgaggtttctatatattttggatattaactccttaccagatatttggtttgcaaatattttctcttgatctgtgagctgcctcttcactctgttaatagtttcctttcctgtgcaggagctttttagtttgatgcaatctaatttgtctatttttgcttttgttgcccatgccatatccatttgagcattattcataacagccaagatacggaaacaacctaaatgtctattacaggacgaatggataaagaaaatgtgatatatatagtgatatatgcatagtggtagatatatatagtgatttatatatactgatatatagagatatatatactgatatatatagtgacatatatatatagtgataaatatattccagtgtctatatatgatatatatatgcaatggaatactatacagtctttaaaaggaaggaatttctgtcatttgccaccatgtagatagaactggcggacattaggctagctgaaatgagccaggcaaagaaagacaaatactgtatgatctcacttatatgagaaatccaaaaaaaagtcaaattatagaaacagaaaatagaaaggtagttaccagagactggggggaagaggaaggttgggaaagggaaggtgttgatcaaatgatagaaagtttcagttagactggaggaataaattgtagcgatctctagtactgcgtggtggacacagttaataaaaatctatgtttcaaaattggtaaaagaatagattttaatatccgcatcacaaaaaaagataagttggtgaggtgattaatatgttaattaacctgagtgaatattttacaatgcatacatagatcaaaacatcacatgataccccataaatacacataattattatttgttagttaaatatgaaatagtttaacatgatattttgaaaataggattgctaagtggatagagctgcttttagaaaaagggaaaattcagcaaaagaaaaaaactcttaaattctaataaatatttctgtagtgtggtagtttatacttacacaaagttggtcagaaaaatgagacttacctggaaaataaatcagttgtccaggaggtgaataatagagcagtatttatgaaaatgaccccaatttcagttggttcattggagttttatgacttataaaacaaattctatggtgatcttagataaaattcctataaacccatctatttcactcatgtcagaccacaccaagtgccctttgtgagaatggagcctgagcagcagcgactttcagcagagcaagttgcataagcaaaaaggcgtgaagtaattaaaaggcatattttgactggaggatagaatattgattttgataggaaattgggctaaaatgttgattgaattcccaatcacaaagatccttgtatttcaaactaaggaaacaacttatatattgacattagaaattcaagttatactcagacttccttgcacttgtaattatctgaaggaccattcctagtatgttaatcatcatatatcatgcatgggtcctgttgtatttcttgacacctttgtcagtgttcacattttagagaaatgcttacttttgtcatggtctatgttatttaataaagtttggagcctttgctgattgcattatctccttgactttagattgatcatggggaatgaggaaaaaggtgggatctggttggcatggaattaaaggctcaagttgagcattttgccgaagtaggtatatgtcattagttcagcttcttcacacatgtgcagtgcatttttttccccacaggtaataatggggaattcaaattggactcgatttcatattcacaacaggacttctaatgtttttaaatgctgtcaatattaagactactaacatatcatctctttctccccctaaatggattacatgggtgccttttccagcttctatctaagcactatccaacagaaaaataatgtgagccatatatttaattttaaatgttctagaaaccacattaacagatcaacaggtaaaagtcatttgaaaatattgtttcatcttagaattaaaattttaaaatgtggaaatagctttacattctttttgtatgaactgtccaatatctggtgtgtctttatatatacaaaacatctcaactcaaactggccacgtttcaagtgcttaacggacgggtagccagttgctaccttattggttggcacagttacgtcttccttctctctattgtacattctctgatgcttaagtgcctattttctgagtagttctatttttcaagaggagagattttttttttcagtaaagtgttatatataaccgattgctctggtatctctttatctcgatagttatgtctctcagaattttcaatatacttctctgtttactttgctttccagttaaagtggtttgcccttgacatagactcatgtgtattagaaaatgtagcatctaatttcatacttagctcttttgttatcacaaaagaatcttgctttgcctctcttggtctgtcctttgctctccttttttctctcttcttttccctttagcccctccctcttttaagagttaaagacaagcagtttttaaacaaaaggtgcagaaaacttcttttttgtattcctttactataattttagatgtcagtttgcctatactttatcacttccatccctcacatggctatattaaatgtctagatattaatggaatttttttttttacttttcaagataaacagtagtgcaggataggagcccttaatttttattttcccaataatttacagcacgtgcttccaagcttgcaatcacttatattgattttcattttgttgaatatatttcactaataaaaccaaaaagatatctgcatttttaaagtggtcctttagcagccgaatagtagaaactgtcataggaatactttctttagagaaaaaagttacatatttataagcaatatattggctaaacgttaaatcttcaggccatatttttcctgagtctgtgctgagtctaatgatgtcagtagaactctcgaggtcttttaagatggtaggttattagattggatatgtttattgtcttattgctgtcagtaaagataaacttatctgttggattattaatctctatttctacataaaaggaaaaaaagtgagtttccgtagatggagctggtctatttctgctcctatgttgggatcacaagggcagcatctacagatatctcaccagctagtaggtggggcagctcatactgtgtttgcccttgggtacattagcttctgtataagactttttctttcttcttatctgaaacagatttagaattcttcactggcattccctggcctgcatggtttaaatgagatactctataccgttgcaaatttgtcaagcatttcctgaaccttgatagcaattactgctgtcattacatagtgtcattacattccacataagaaaatcagaaaaagaaattgtgatatttatgttagtaggtgtgtatttttttttccagcttgcctcacaaactatattagatggacaagttcccaaaccaatctttggaagtttatttcttaaagctacaaaagaatttccaagagattagattttttgaaatgaccagtttcaaatgaatttaatacaaaactaggatgagggttggaatgcaaggaggaattaaaatatgcatgttttaattatagtttaccaatatgaagtgattcctgtgagattcagttgttggacagatcagaagttatacagaaaaagatcaataattcagagactgaagtgtttcagttttcattaaacagaaagaccagaaagaagttaaagaggagacatgttcaagttcaattaaaccaaattttatgaagcttatgattcatccaacataccgccatgtgtctgcccatagtcccctctccttctagatcatttgctgaaatgacatctcagacacaatcatttgcttcattgtaactaaatacctctttacttcactgctatttataaggtcccttttggattttgtttattaataatcatctagaattcaaataaatgcatatgccactcttgccactcctcttcagcatagtactagaagtcctagccagagcagtcagacaagagaaagaaataaagggcatccaaatcggtaaagaggaagtcaaactgtcagtgtttgccgactatatgatcatttaccttcaaaaccctaaggattcctccagaaagtttctagaactgataaaataattcagcaacatttccagatacaagattaatgtacaaaaatcagtagctcttctgtataccaacaacgaccaagcagagaatcaaattaagaactcaaccccttttacaatagctgcaaaaaataaaataaaataacaacaacaacaacaaaaaacttaggaatatacctaaccaaggagtcgaaagacctctccaaggaaaactaccaaacactgctgaaagaaatcatagatgacacaaacaaatgaaaacacatcccatagtcgtggatgggtacaatcagtattgtgaaaatgaccatactgccaaaggcaatctacaaattcagtgcaatccccatcaaaataacagcatcattcttcacagaattagaaaaaaaattctaaaattaatatggaaccaaaaaggagcctgcacagccaaagcaagactaagcaaaaagaacaaatctggaggcatcacactacctgatttcaaactatactataaggccatagtcaccaaaacagcatggtactggtataaatataggcacatagaccaacagaacagaatagagaacccagaaataaaccaaaatacttacacaaactgatcttcaacaaagcaaacaaaaacatacagtaaagaaaggacacccttttcatcaaatggtgctgggataattggctagccacatgtgggagactgaaattggctcctcatctctcacattatacaaaaaccaactaaagatggtttaaagacttaaacctaagacctgaaactataaaaattctagaagataacattggaaaaaactttctagacattggcttaggcaaggatttcatgaccaggaacccaaaagcaaatgtaataaaaacaaagataaatagctggtacctaatttaaattaaaaagcttttgcacagcaaaaggaacaatcagcacagcaaacaggcaacccatggagtgggataaaatcttcacaatctatacatctgacaaaggactaatatccagaatctacaacaaactcaaatcagtaagaaaaatacaatcccatcaaaaagtgggctaaggacatgaatagacagttctcaaaaggagatatacaaatggtcaacaaacttatgaaaaaatgctaacattatgaatgatcagggaaatgcaaatcaaaaccaccatgtgataccaccttactcttgcaagaatgaccataatcaaaaaaattttaaaaagtacatgtttgcgtggatgtggtgatcaggtaacacttctacactgctgatggggatttaaacaagtacagccactatggaaaagagtgtggagattccttaactaaaagtagaactaccactcgatccagcaatcccattactgggtatctacccagaggaaaaaaagtcattattcaaaaaagatacttgcacatgcatgtttatagcagcacagttcacaccagcacaatcgtggaaccaatccaaatgcccatcactgaatgagtggttaaagaaactgtggtgagtgtgtgtgtgtgtgtgtgtgtgtgtgtatgtatgtatgtatatatgatggaatactactcagtcataaaaatgaatgaattaacagcatttgcagtgacctgaatgagattggagactattattctaagtgaagtaactcaggaatggaaaaccaaacattgtatgttctcactgatatgtgggagataatctatgaggacacacaggcattagaatgatataatggactttgggaacttgtggggaaggttggggggagagagaaaagactacaaatagggtacagtgtatactgcttaggtgatgggtgcaccaaaatctcacaaatcaccactaaagaacttactcatgtaaccaaataccacctttacccccaataacttatggaaaaataaaaaataaatgcatcaggttaatagagaaacatattatttatgtaaattaaaacagattttaagtactacaaatatcttttaataagaaatcagaagtgctcagattaaatataatctcttaacatttttatgagttcccaaataaatgcaatataaacatattgaaaaaaattatccatttctaacatttcagcatccattgccaacacactctctaagattatcgcaaccatctgaatactacattaaatacatgcaaaatactttcctatattcttctcatttagtgtagaaggaattggtatattgaaatgacattcatatcccagcaattaaaataatatgatttagataatgttatttgatgtggtgatataaaccaggactttgcagtgtgatttcatgtatttagaaacattattagccattatctgtttaaatatggcttctgccacattctgggatgcatatatattagaccgttttactgtgttctctatctttttgtgtctccatgcttcattccaggtatttccttctgaatcttaagatttagtaattttctatttacccctgtcaaatttgctgttaaacccatgcacttaattcttatttttcacttactgtatttttaattctagaatttcttttggattatccctaaaatatgttatgtcctttttatggtttacagttctctgcagcgttctcaatcttgtgtctaatctctttcaatatagtccatgtggctgcttaagtcacatttcatatatatacatatacacatacatactttaaaacgtataaacttgtttgtatatacatactgtatatctctatataatactttccctaatataattatacatataaaagtatatacatacacatatgcctctttaatagcctgttttctcaattgcaattgggattaacaatgtatatgtctcacaggtttattataagaattaagaatgataatatttatggggttattactagagttcttgatacatatactaagcatgcgtacatgggtgttctttcagtaaaattagacatgacatgatataatttaaaaatcaaggtcttcggataatgatactattttttttccaaggcaaatgataacactgagagagagtagcctttcagtatcagatacaattggaccctgctcggtttctgcaaataccatctgtatcaccttgggcaatttacttagcttctctgtttttctgtttcctgcccttatctgtttttctgtttcctgaccttataaaacgaattgaacaatatagattttacaggctgatttgtgaatttaatgtaatatgtgtaaggtccctggcatattacacatgtagcaggaatgtatcttcataatcatattaaatatatttttcagattttctaattttgttaatatttgaaactagtaatataattgagtttgctgacaatttaggaaaacatggcaaagtgtgaaacaattaagtgattctcattcttttttcccttttgataaagtttttgacactttgccaccaatgcgctatcaggagaccatgagtgccatcaggacatgggtccagcagtcagaaaccaaactctccatacctcaacttagtgtcaccgactatgaaatcatggagcagagactcggggaattgcaggtctgtgaatatttgaatgtcaaaacaataaagcacgcttatcaagcattcacattgatataacctttaaataatattagaatttaagtcattctgacaagtatggtagtttgcccattgagcaaatgaaaatgagactttacagtattatttatgcatatactctatctatggatatatatgtatgggcatatatacatgctgtttttgaaaacaattgtatgatctatttatgaagtatatttttaatttagcatgcattttcagatgtattgattttgattattagaaaaaccattgttttattccccacctttgcttctttatttgtaactcctgtcacattctcaaactggtgggtaaaatcagtgtacagtcatcccttcgtatccatggggaagtggttccaggaactcctatgaatatcagaattcacagatgttcaagtcctttatatgaatggtgtaatatttgcatataacttatgaacatgctcccatatactttaactcatctctggattacttataatgcctaatacaatgtaaatattatgaaaatatgtgttatactgtattatttaggaagtagtgacaatgaaaaagtcttacatgtttagtacagatgtagttatttttgtcaaatattatctattagtagttgactgaatccactcattcagaatccacaaatatggagggctggctatatttataaaattggtttaaatttaaacattaattttctgtaatgtaatgagacatttgaattctaatagctacatttttttaacatccttctatcaggaaagatatactaatatgggaaatgaaagaaataatttgtaagagattttataatacttttcctactttattttatttttagacggagtttcattcttgttgcccaggctggagtgcagcagtgctatctcggctcactgcaacctacgcctcccgggttcaagtgattctcctgccttagcctcctgagtagctgggattatagtgcgtgccatcacgcctggctaatttttgtatttttaaagtaaagatggggtttcaccatcttggccatgctggtctcaaactcctgacctcagatgatctgcctgcctcagcctcccaaagtgctgggattacaggtgtgagccactgcgcccagcccttttcctacttattataaaatactacattatatgttcaataactttttatttctgaagacatgaaaacgtattagttatatttagaagctgagataatatgtgcattttaagaaaaatgtttaaaaattcaaatttaaactttatcacatagaattttttttggataattaaatatttttttgaagtaatgtattcaaagaaaaatacatttaaacaactttcattatgtattgtcctatttagatatttattctactacaataccaaatggtagctgtttcaccttttttgtttccttttgttgtggtttttaatgcttggcataatgattccaaagtctatctggaaaaatgtgttgcctaatagaactagtaaacttttaaacataagaataaaaatgtgcaagaataagagtggagaaaacacaagaaaaggcagttagatgagcagaagagactatttccactgaaaaagataggaaagaaaataattgttcataaatattattgggaaatgtattaactaactaaaaaaaaagatatgaacatttcccccaaagttacaccaaaataaaaaccacatacaataaaatgttcaaaaaatgtggggaagcccaaattttggaaaatatttaaaataataatgttataaaaatttaggtggagaagcataaaaatcgatggaaacaatcacaaacattgtaaaaacaccagagacaattttaaagaaatatgataccaaggaatctttttttttctgtgagtaaggaagaaagtcttgagtaaggtatcctccaaaaagagacatatatgaataataaacctatgaataattgtaacttaaattgtaaaggaagaagtaaaaaaattacaagatgagaattttttttgcatactaaattgcatacacacaaaagatataagtaccaatttgcaagtggtgaaataaaaattgtctcttactgctggaaatgtaaattcaatatgaattttactgaggttaactcttcagtgcatcctaataacatacaacattaatataatttccatgaaatctgtatctgatggaaataatcagaatacactcaaagatgtaaatggaactggagatagataggatattgattgattgagggatggatggatggattagataggtaggtagatagagataaacataatttacaggagtggaaaactagaaatgaatgtgtagaactaataatggaaattgttgaactagaaaagccattacaatttttgtttttgaaaaaataattatttgacatgggcaaatgctcacactaaaacacctagctcaaagtgtagttatatgctagatattgtctaaataatcagtcataggggaacaatttgaaaaagtgaaataaacttaaaaaagtaaagtaaaaaaacaaattaagtaccaccaaataggcataggatactatgaaactataaaacttagatatttgacaaattttgggttgatataggtcacattataggggaaagaataactgtttatatgtgcatacatgatcatatatttaatatttagctatacatagaacaaattgaaaatttatataaagtactagtagttctggtttttttttccatttttgtcatgagcctttattattttataaagtaaaagtaacattaaagtaaatattgaacaggggaagtctaaagttatgatcctactgtaagaaattacatgtgttatacagaataagtataaataaattttataaattctccacaaaactatccttgaatcccaccataatactacataacagaataacattttttgaaaatatattaagtacatagattgttcaataagtttttctattccatatatcaatattattagctatagttttatgtagagtttactttcctgaaagctcagtataattaatttcaactccattaactgtatcacaaatgcagttattaatatatatacttaattcagtaaaattagatgcaccaaaactttttggctctgtaagatatagttttgagatatatttgacattgttcagaaaaatacatatggagtgttaaataccactaaataatattcaagttactcttaggataatatgtaaaatttaaattaccactagaagtttataactgatagaagatcatctactttgtttacatgtttgaatcatatagatttcaagtacagttaatttcactaaaactcatcaattattattcatcaattagggtaaatgtatttaaaaaattgttttttaggctttacaaagttctctgcaagagcaacaaagtggcctatactatctcagcaccactgtgaaagagatgtcgaagaaagcgccctctgaaattagccggaaatatcaatcagaatttgaagaaattgagggacgctggaagaagctctcctcccagctggttgagcattgtcaaaagctagaggagcaaatgaataaactccgaaaaattcaggtaattcaagattttactttctaccctcatttttatttacttgttttttccctaacgatacactgtaaactgtaaaggtacataagcatttgaccttcagcatctttcaaagttagtgagaagatgaaaagacatgagtcttttacaaaggatggcgatttgcttattccttctaggaaaagaataggagttttctcagtgtttttagaatgaattttctattttcaccattaccaataggaattaaacatgtttttagtttaataattttcaaaaccaatcatccatttagtctggttgtcttttaagatacgggtaatcatttagcttatgactagaaaaaagttatgtatatatacattatacagaggtatattgtaatcattttatatatataatgtatagtatgtatatgattatttcctatattacctttcatttctgctgttttgctacttataaaaagtaggagtcaactatgctgtctatatgtgctattatatataaaatatggtgatatgttcataaaattgcattatatattcatcccattatgtataactccatatatgtatatgtgcagtagaaatgtaggtgtattaatgtcctatgatactcctaagaaattagcagaaatttaatggcttcaaacaacacaaatttattacattactgttctggaggtcagaagttcagaattaatctctgtgggctaaaattaaggtgttagcagaactgtgtctgttttggagactttgaaagagaatgtgtgttattggcatttttagcttccatatatatatgtatatatatacacacacatacatataacatgtatatatgtgtgtatatatatatatatatacgtgtataatggaattatatatcatgtacatatatacatatctaatgtaatatatatcacatatgtaacctgttgtatatgtatattaatgttacatatgtaatatatagtaataacttattttatcaccatatcgaatttgtaattatatgcttaaattttaccacatcaccttcttcctgaaaccaaattcccttgacttaatttgtttgaatagtgccaccatactaataaccactcaagctaaagaaaaacagtaaaccaacaattgcattaaggtctaaaagcctaaaatattcaataaggtaagtaatgtgtcccttgagtggtcaattattgtgacaaatgttaatgctgggaaggaaatgtcgaaaacgttatggtatgatggaaaaacattgcaacaatatgctcctggatttaaatcccagtctagctgcttagtttttgtgcttaccttttacaaaccaaagcactaagcaaacctaaaacattttttaatgcatagcatttctttacttataaacatatgtgtacatgcatacctatgtaaatactgcatgaaaatatctattatttgtcaagaccagtggcctaagagggcacaattacatggctcttgttatcaaggagcccacattctagtgaaggaggaaggtaggtgtattcatttcctatggcactcctaacaaattgccggaaatttaataacttcaagcaacacaaatttattagagttctggaagtcaaaagttcaggattagtctcagtgggctaaaattaaggtgtcagcaggactttgtctgttttggaggctttgcgacagagtctgttttattggcatttttagcttctagaagcattccttgtctcatgtccccatcctccatcttcaaagtcagcagtgtaacatcatctagtgtcaatttctctctccctgtctatctccctctccctctctttctacctctccttctcaccttcctttccctatcctgttccctgtgttgacttccttttaattaggacctttgtgattacattatgccctggtggatgatccagtataatctccccatctcagaatccttaatgtaatcacatctgcaaagtcctttctggtaatatactcacaggtttcagagattagggtgaggacatcttgggggtagcattattcagccttgcatggtaaataaattaaacagtatgggaaaggttgtcacagtaggcaggaaggaaatccaacataaactaggaaaaaggattatgaaatattatcggaacataggttgtctctgctatagattaaataggtagaatttagttagctaataccgagaaagaaagagttcttgagaaagcatagcagcattttcagttaaatgatataagttcaacactgggtagacaatatatatggggattaataaaatattatggttggaaaactggattgagagtagacagtgaatgtccttggatgctatgttttacaatctgagttttaatctagtggtgatgggactgataataataacaataaaaacttaataagaaaaaactgctattggttaaagagggaaataatatgattccacttgtgttttcaaaacattcccaagatgagaggaaggaggagaggagattactggcatcactgtagatcagtaattagaatgaggtgagaccgaggcagatatcaaaacgagccagtgcattaatggagtcactaatgagacctgaacagcccaggcgtagtggctcatgcctataatcccagcactctgggcagctgaggcaggtagatcacgaggtcaagagatcaagaccatgctggccaacatggcgaaaccctgtctctactaaaaacacaaaaattagctgggcatggtagtgcacgcctgtaatcccagctacttgggaggctgaggcaggagaatggcgtgaacctgggaggtggaggctgcagtgagccaagattgtgccacttcactccagcctgggcgacagagcaagactccatctcaaaaaaaaaaaaaaaaaaaaacaaaaaacaaacaaaaaaaaaaagacctgaacaaggacagtgaagatgtgaaataagaacaaatgtagacttgaaagataacagcaaggtgatcgtcttgaagttctcttagataaatagtttaaaaattattattaataatcacattaaaggggaaactttctgtggagcacatattttcaatgtaaatttaagtaaaacagaagaaaataacacatgtagacagcatagttgaatcatactttttagaagtggcaaaacagcagaaaaaaaggtaatacgggaaagaatcatgggtgagagatactggctatttataaatgataaaagatgatgatttttacctgatcattacttcgtactggtcagacaaataaaagcaaaagctctgtctttgaagatgacaaaatattagtccaaaagttcccaactggaaggactatttaaactgtcatctgtagaaaataatttgtgaaagttcgggtttagggaggctataaagacaccattacattgagtttattgttcatagtttgttttatgtactgtaaggacacatttttagtattctcatgagttgttttgtaacttaaaatttctctagagggggatatgatttaatgttctcgagagtaacatcataaaaccacatttggtagtaattttgtatttttaacaatagcagacttcacacaccagtgctcatacagtagaccataaaaatgcagtcttagtaaaaatattctttgcctcaagaactacttagagacatcctttaaacatgggaattgtttttgggcctgtgtttagacataacacaatgatgaattgtgttaaaagtaatcagcacaccagtaatgccttataacgggtctcgtttcagaatcacatacaaaccctgaagaaatggatggctgaagttgatgtttttctgaaggaggaatggcctgcccttggggattcagaaattctaaaaaagcagctgaaacagtgcagagtaagatttttatatgatgcctttaatatgaataattttgtatgaatattatttggttagatcagtgttttacagctggggtggattttgctctcctctccccagtggattttttttaatgtttctagacgtttttgattgtcacagctgggttgggggtggtggttagatgctactggtgtctaataggtagaggagagagatgctgctaaatatcgtacagtccatagaacattcctccagaacaaggaactgcacaatctaaaatgtcactagtgccaatgttgagaaaccctgggttgagtaaatgaggaactgacaaaacattgccttgtactcaacctcatttgataacattattttactataaaatgcagtataatttaaaggtaaagaatcctttgagctacttgttatttcttatgataaattactattcatactgtgttgttctcttcatctataatgcactgtactataatataacacagtatgcattttgaaataatattcattataccattgtcatgcagcaggaagaaaacaatcttgctctttaaggaaatttttttacaatacaagctaaaaaagcaaatccacctcacaaataaccttcacacccattacactgtaaacaatttctgcagtatcctgtgtttgaaaatgaaaatactaacaaagataataaagtatgaagcccatcattttcacacatttttctaaccagaaatattaaatttatttccttttgtttctgatataagtagaatacaaataattccccactggattcatgccataataaccattgaacatttttgcaagactgttaggcagtcatctatatcaatatctctgtatctcagattttaaaagacaaaaatccatatgcaatgccatcagtcccaattttacattttctagctatgtttcatatctaatatgtggcagtaatttttttcagctggcttaaattgatttattttcttagcttttagtcagtgatattcagacaattcagcccagtctaaacagtgtcaatgaaggtgggcagaagataaagaatgaagcagagccagagtttgcttcgagacttgagacagaactcaaagaacttaacactcagtgggatcacatgtgccaacaggtatagacaatctctttcactgtggcttgcctcaacgtacttaactaagatttcctaatgtctcccttcaccgttacttttggttaaggctttgttcctatgtttttgctttaaagcacaattaattctgacaaattaatcttttttctagcatatctaaatattttcatggtatatattttaaatagtacacattcatcttattttgatcctaaaatgactttcttgaacacaactgtcatactaaaaaatgaaatcctattcttagtcattatttccaatccatgttttcttcagaacataaatgtataataataatgggattaagaaaaatttgttacacggagatatttggtacaaaataaaatgcatggctaatatatgtgtatgtagaaataggataaataattataactttcgattaacatttccaagtttggcctcttcgacacatttattatttatttattttattttttgggacagggtctccctctgtcacccaggctggagtgcagtggtgtgaactcggctcactgcagcctcaacctcctgggctcaagcaattctcccatctcagtccccacaagtagctagaagtacaggtgtgtgccaccatgcctggctaattttttgttattttttggtagagacagggtcttgctgtgtttcccaggctggttttgaattcctgggctcaaacaatgctctttccttggcctcccaaaatgctggaattataggtgtgagttaccacacctggctgacatctagttttaaataacaattaagattcagtaaccattaagaatagctgaatttcaaaaaaaaacacacacaaaatgactgtacactcatatttgagtttctcatttttctacagaagaatattttatagatatctctcttatatttaaatattcaattacggatagtaagatatattcaaaaatagtgtatatcaaatacttcttgttcgaaagataaaattttgaactaaagcaatgaatacttttaagttcaccaatacattagtccccgatcatctgcagttttgctttccctggtttcaaatgcttgtggtcaattggaatcctaaaatcggtgagcacagtaaaataagatattttgagagggagaagaagagagataacttgttctattttattagttgttaatctcttactatgcctaatttataaattaaattttataggtatgtatgagtaggaaaaaatctagtgtatatagggttaggtatcatctatggtttcaggcatctattggaggtcttggtatgaacatatcttccaaagatacaagggaactactgtacctttttggaaattaataaggggtttcaatttacgtgttagaggcagttggtctttggttactgctaagtaaactttcaaaatagaaaagaagtaatgtcaaaaggcaaaagctacatttgaaaatgaaaaaaaaaattagaaaagtcaagggaaatcactcagctaatacaatcactgacaagtgttcattggttctgttaattcacagatgagctgtccctgggtcagctagctcacattcttctcctgaagtaagtcagtgctagaagagttgtttaggaaaaaaaaaaaatattacttaaataatagattataccattgatgttttcctggaaggccagtgtgaaaggtatttgttttttgtttgttgaatgttcttaatggatgaataaaaagaacatcaccaatttatgtagagcaaggggaaaacatcagccaaaaaaaaaaagtataaaaccaacaatattactaaaacctcaaggtttttacattttacaggagtacaatttgtaaaggctctctaaaaatgtctttgcttaagaccttatgtctgttatatgtactaagaatttgttgttcaagagatatattttaaacacactcatctgttgcatagcaaaaaagctatagatccaagctatgttctgatctccattttctaatcttagaatattatatgtatctgtgcttttcctacaagtatcactctggccatgttctgactttgtagccaaatgagttaggttgtaaaaggaaggaacaatggcgctcaaggagaagaagaagacgatgcggtaaaaacaaggaagccatatgtgaatattgttaccaattcagcattccagagagaataatggaaatgaagtgtaaatctatgcattacagaaatatctacagacaaaataagtgtgtgatacactcttttgggttaaagataattccttttttgtcaccagatgccaatgtctgcgaaaacataaataatttgaaacaaaattgtccaaatatctgatacatttgaagatgctttcacatcccatgatctaattttgggtatataaaatggttattattttaaattttaaagggtatgtatataagtttaaaaatctagattctagctatttctaaaaaaatgatcagatataagtgagggaataaaatagacattgtagttaccttcacggagataatagtttagtggtgaaaatggaaagtaaataggttaacacattatcacaacaatgtcttgtttgaagtcttgcttacactctgaatgtagcaataagaaccctttaaatgagagtgacaggagcaggaaaactactttctattgggtagtcagtagagtgttttctgaagaggcgaaattaaagctgatacccgagtagtaggaacttgacaatttgttgtgtcaaggaattctgccagaaaatgaagtggagaaaacatctgaggcaagagagggcttagcatgtttgaggagctcaaaggaagccaggagaaaaagagtgggaaaatgagtcagaaaggaatatggaagccacagtgatgatttagtcattatgtcaagtactttggaaagtcatctgacttttaagcataggagtggcatcatttcatttcatttaaaatggttgttttaagtttgctgcatattcctattagaagaagaataaatcaaaagggctgaagtggaagcaggtagggattgcaattgtccaggtagaaaaaaaaaacaggcaggaaaaaggggatatttgtggatattgtagttttctgaggaacctccatgctgttctctacagtgactgtaccatttatattcccactaacagtgtagtgtagttcctttttatctgcatccgtgccaacaattattttttgtctttttggcaatatacatcctagctggggtgaggtgatacctcattgtggttttggtttgcatttatttgatgattaccgatgtggaatttttttttcatatattaattggccatttttttcttcttttggaaataactgttcagattatttgcccatttttgaatcccatcacatccacatatgatatgatgttttatatcataaaatcgttatttttctttttatgatatctgagtttctagcttctgcacagcaaaggaaacagtaaacagaatgaaaagacaatccacagaatgggaaaaaatatttgcaaactactcatccaacagaggattagtatcctcattacatttttgatgaggactttcacacttacatctacccagaagtattattcctatcctaacatgacacattcctttattctttttaacagatcccattagatctggcagtacttgctgaaggagagtgtttgttgatagtctagaggaagaatgagggaagaatcaaagtgttttcagatatatttctgttatgagctacattgtaggtcattgtgattttaaagaaagagtgggtactaagagaagaacaaaatggaatagcttactagagtgactagcggttccatcttagccatatttatttcggagaaaaagacaatcagacatgtatctggaagtcaagtacacttttcaaactgggcatataaacgaggtacataaaaataaagataacatgtatataagatactgtttcttgcctattgagaagatttccccatgctcccatccctaaaatgcttggtcaaattggataattcgtaaactcttagagatggaagagaatctatttttgtttaaaccactttgttgaggtatgactgacataccaaaagctgtacatatttaatttatacaacttgattagtttggggataagcgtatacccatgagacttattaccacattcaagatgataaacttacctatcacctccaaaagtttccttctgccccttaatttatttattttttttgttttgtgataagagctcctaagatctatcctcttggaatatttttaacaatacagtatttttaactataggcccaatgttgtacagtagatctgcagagctaattcatcttgcataactgaagctttgtatcctttgggcatcattttgccattttcccctctctcagcctttggaaaccactattctactctctagttctgtgagtttgactattttagattctagggaatggaaggaaatattcacaaatcatatgtctggcaaatgattaatatccaaaatatataaggaacttctaaaattcaatagcaaaaataaaactgaaaaataacctgattaaaaatgagcacaggacttgaatagtcatttctctaaagaatacgtagaaatgaccaacaggtatatgaaaaggtgcatcactaatcatctgaaaaatgcagttaaaagccacaagaacctcttcatacctgttagggtggctattatcagaacaaaacaaagcaaaagatactaagtgttggcaagaatgtggagaaaagggaattcttttatggtgttggttggaatgtaaattggtgcagccatttgggagaacagtttggaggttcctcaaaaaattacaaatagaattcccatttgattcaccaatcccgcttctggatatatatccaaaggaaataaaatcaggatctcaaggaggtatctgcacccctatgtttacagcagcaatatttacaatagccaagacatggaaacaatctaaatgtatattgtcaaataaataaaacatggtatatgcatataacggaatattatgtagctttaaaaaagaaaattcttccatttgcagcagcatagatgaacttggaggatagtatgctaagtgaaataaaccagacacacgcggtcaaatactggagaatattttttttgtggatggaaaggcacagtgtgtaagaccagaagctctgagatcagatcgcctgggtttaagtctatccacatcataaactgcctgtgtgattctagaaaagttgtttaacctttttgtgcttgagtctcccaatctttaaaatgtgatgatattaatacataattcataagtatataataattaaatgaattcatcttttcaaggtgtatagagcctcatctaacctagattaatcactgtacatgtttgttagatagaaaacaaatagaaacctacatatatagaattataaaacatgtatactttctaagtaaataatatatggttatatattttaattattagtggctttaaatttatagtaaatagttatcaataaatgggatttagaggttacgtggatgtctttctgccagcttgcagatcattgtctttctctgggtcagtatactctttgggtgtagtgatccccagatctctttcgtcagatctctaacagtctgtttttccatctttctgcaaaaaactagcttcttgttttaccgagaaaatataagcaatcagaatagaagttgcagtactcccactgacctgcatataagctcacagactctactttccctttgtttacatagatgaactttctgtgcttttgtctaaggccagcttttccacttacgtacctggatccctttcccttgtctctgcacaaggacattgtaacagctaatgaacagccctctacctcctacatcttctccacgctacatcattcccatcattcccatcagtagagaattattctgtaatatctcctgtcatttaaaagaatcctcaattggacaacaatctctctagcaacctctccattcccgtttccctttacagacattcctttctctccatttcactccttcccttctctcttgatgccaattaagagagctaatcaaactgttatcctcactattctattaaagcagattttgtcagggtcatcagtgaattcgtattactaaatcgctaaattcagttggcttctgtgtcatcattctttcttaattatctcttagttttccctgaccactgtcaatatccttggtggttctattgccctgaccactaaatttgaaagtgttccagggctcagtctgtggactccttttttttttccccctattaccacccactctccgggtcaacttatcaagctccatagttttaaatgtaatctgtaagttgttcctgctgtaagttttttttttttttttttttaacaatctggaccctttctaatgatcctagacctgcatacccatttgcccactcaacacctccacatcaattaataataggcatattaaatctaacatgttaaaacaaaattcctgatgtataccccagtctactaccctagaaatttgcctgttattacaaatggcacctccatctttccacttattcaagccaaatcccacgagattttcttgtctcctatatttctcttacagccgaacatcaaatctatcaccaaatgctgtcgtttttgccttcaaaatttccaggatccaacaatatctcaccatacttgagcacgtgcacacacacacacacatacacacacacacacacacacacacacacacacacacacaaagtatgtatgtgaatgtatagtttttactagaagtcttggctgaattccattagtccctctaatatttttgtagcttcaccaactgccttaaaagattataacagagcagagtttctaagtagaaatttagcagcaggatttcttaatttataaaatagcaaaaatagcagcatgttttcttaagtttattataggttcattgactgcacaaaataacatttataccttttctagtacaattgcaagacatattgttctagatgtgttagggtgaaacatttatttacattgtagtagatcaagtactacatttacctaggtaagtaaagaacctaaaatgaagtattatctatattaggctcaaaatggttgtaaattataaggaaaatcaatgcgatagtgattctacacatatttactattgggcaaagtaccatgaacacttcattttactaaaactgtgcattatatattaatactatgaaaactctgttacttaaaatgtataatgttgtttcaaccagagagaagaataccatcttttgaatagagttactttttaaagtaaaagcactatgtataatgattgtaatactatagagtgccttgtaacaaggtgtatgattttcttttagatgttttaagttttgcatttttctggttaatgagtaatggagtccattgtagaaagttttagttttcaaaaatgcgtgaggctttaaatagcagatgttttctataaccacagacagactcttttgcaacttgcattttacacgtaaaactttatattgagccacttttcatttcagtaaagatgtatttgtgatgcacagtatcccatagtatatatatgtcataatttaatctctcatgaaagcacctttgggtttgttttcaagatgtttggtctttaaagctgaattaaatattgtacatgttagtctctacactttggttggcatgattcactctcaaaaaatggagcagttgactcagattcgtggacattaacatttttatatgttttgccatcttactatctaaaaggttgtattatgttggatatttccctcaacaagtataaaaactttgattttcccacatccctgcccaaaatgggctctttattaattattatttttccctgtcttaacatgtgaaaatgcattaattcacttcgatttgcaatcatttaactataaatggtattagaacatcttttatatacatgtattgccatatattatcttctttgtgaattgccaaactacgttttatgcacttttcgttttttctttttaatttatgagagtttctgtagatacatgattatgaagttcttagaatatttaaaatagtaaaacattatgaaagaacacaaagaataactatttctatgtatgccaataaaattacttttccaactgaaacatattattttaaaaagccttgtttttctccattcacagaaaagcattgtcacacaaacagctgaattatcatcatcgggcaatacgttcattttattaagtatgccaaataaacagacatgtcttattttcacacttatgggaaattgagtgtatctgatccccatgagttattttcttatgcatataagctttttacttctttatcattactatctaagctttctgttatttacatactgatgaaataatataataataatgtttcatcactgtcaataatcgtgttttgtttgtttgttttgtggaaggtctatgccagaaaggaggccttgaagggaggtttggagaaaactgtaagcctccagaaagatctatcagagatgcacgaatggatgacacaagctgaagaagagtatcttgagagagattttgaatataaaactccagatgaattacagaaagcagttgaagagatgaaggtaaaaaaaaaaaaagaaaaactaagtaaaacaaaggaaataaatggaaaaagaaagaaatgcaacaatgcttgaagttgtatacagtctgctctttcctggttctaagagaagaggttgatttttaattaataattttaatttagcttcaagtttaatatacattttaacaaccttaaactgtttaattttaatgcattgtggtcaattatgaaaattgaaaatcacaatttgaaacaattttcccttgaaatcatgtagtattaagagagcagaatcaactcatttcattaactgtctgtagctgatgtaaatgtacgttgaaactgtgcaaaagtattcttgaaaagacaaatttataatgtagtcaacaaactgtgttaatttggtagtttgaaggcatttctgagaatttggaaacactaaatatttgaacccgtagcctttaatatggatagaaaggactgagtttacatgtacttttcttgaaacaataggacaaaatataacattgacttattacgaaggaaactggtatgtagtatgtagtatggatttggaggtgaagcctggacttgaacctacatagtggcatttcgtatggccttgggcaacaatataatagtcaatataatcctctgttttatcatgtttatatcatcatacttcctcacttgaatgtatgaactgttgattgtaactaccatgtgagtaaattgcctaactcagagttggtgctcaattagtagctataatcataattattatttttatgtgctagcaagaacttagagaatgacttgaaatattaatactgtagatctttttttggttcaaggattgtgacaaggaaaaatcaatgtggagccagatacttgagtttaaaacttagttcggccccatgccaactgtataaattggggtgagttacatgagcttactgagccaaattccttcgtttgtgaactgggtatcagaatgtctgctttcagaatcattagagggatgaaatatgaaatttctaacacaatgcctagcacagtataaatgaccatgactcattatttattattttaattgtgaaagggccacatggtaaaaaattatataattaaatggtaattcagaaatatctattatagttaatagcagaaagtaactcacatgaaaactcagatgtttaaatatcgaatctgtcatacggctttagtcaaatgttgaaagtaaatatctaatatactccataaatatgtataaatattatgtgtgtataaaactataatgaagaaaaaattagtataatcatttctagagtattaaaaacacagaattattctaatctagcaatagcatatttatcaactaaaacttattgcatacttactgtgtgccaaacaccctctggctactgaatatagagggtggtgagcaagaccactgccttggaatttacattctagtgttctagcgtgtggtgaggagcaggcaataaatggaaaaataaatgaaatcatgataatttgcctagaagtaaacatggattttgaaatcaagaatgaataatgttcaggcaggatttgagggtggtaggatgctattttagaaaaacttgacttatagagcatttatgaagaattgtatgtaatatgagagaactgaatcataaggaaaagccaaccacttaaaaaaatctttatggaaacacattctattcagagagcatagcttctgcaaagaccctgaagctaattgggaagagaaagaaatctgcctgaaggaaggaaaatgggataaaattacctcagataagtcttaggaggtgggcaaatatctgttaacaaacgggttttgttagagtatcacagtttttattctaaatggacaagaaaaaccattggagtatttcaaaagaccaaaataatttaaaatttgactttggggaggtcacccctgaggaaaactttatcagaatgtgagagctagaaggtactttgaaacttgtgtaattcacacttctctctctgcttatcagaaaactgcaattcccagataggtcaaatgatttagccatagtcacagactttatttgtggtagagcccacaggattgaaggtattttattctatttcatctcttttttcctttcctttcctttcctttcctttcctttcctttcctttcctttcctttcctttcctttcctttcctttcctttcctttccctttccctttccctttccctttccctttccctttcctttcccttccctttccctttccctttccctttccctttccctttccctttccctttccctttccctttcactttcactttcactttcactttcactttccctttccttttcctttcctttcttttccattgtgtgtcactcatatggccttttctcttgtatctcaattcctttctcactgcgtctatttatatatggccactacctcagatccgtaagtagatactatagagtcatttgtgttcagctgctctgattatccctgggttcctttggttcagtgcctcttctggccctcttccctctccctatgagcgatttgcctatgtcaccaacaacccagtcagatctctcttattttcctgtgctctagagtaaactgtctcaaatttttaaaatttgaaaaccatccttgaaatgagtgttccaacaaatttgtctacattgattgacatgttttgataattggtctagctacaaaattggtttagtatgggggtgatagtaaaaagaggtaaactctggaagcctctggcaacaaccactggaagagttggcaggaagatttcatttcttgagttttcagcctgctactcaagacagtttctttaaggcaacttcactacctggaggttagcaatagtaccttgtccagacttctacctgtgctcatttgatagctaatttttctttattgtcagaagatactaacagacctattttgacatctctccctgatactcaaagaagaaatagagacccccccttctgtttatgttctttcctgtgttttacctgaaaatggaagtgctgttttaataacttatttttcccctgaaaaggaaagtttttttgacataaaagaacccagggtacagtttgataaacaacctctgactttaaaacttttatggagatcagcaatcactatatggtaaaactttatactaaaaccctttgaaaaacactctggaaagttattaactggttttatttttttttaatttttactctattataactctagtactagtgcttaccagaacttacacataaagtgagaatagtaaatacacaaataaatttgtataatcactacagcagtgattcctgcatctgaatggacatcagaatcacctggaagtcttgtttaatacacagagtgctgggccctgaccccagaatttctgattcagtgagtcttgggtgaggcctgtagtttttcatttttaacaagtttgagtttgataccaaagaacaagttgcagagtgattccaagggtgctcactttaagaagcacgggtgtgaaatcctagcaatgaaagatggcagagcatatcatagttagattcatggaaagaaacaagagccaccgtttttatgaggatttgtatagaaactgtaccagtcatttagctttctaccttttctcctagtagagaaattcatcatcatcttctttcctcatatgtacctggattaataaattttgctgtttgttcttcgaacctttcccaagatctgagcctcttattaaaccaagaatatatgaagtctaaaaaccatggaaagaagtgttcttcattctacatttttatatagttgcttgggttatttataatgagcataaattgtaattttattcattagactgactacagcatgctccttcttcagctcatggaacatttgagacccgcttaacagaaactatgagaaagagaggatataactctgaggatgatttccttaaactctctgaacctcagttttctaatgtccaatatagaggtaacaaaacacatccgagaaggtttgggtaaagatctaatgaggtagcacttatgacatggctggcacagaacacagtagcacatattaaatgatgaatggtaatcaaacttgttgattatactataattactaaagtcaaaatgcaatttgtgtaaaaacaatctctatgctcagtgatgccaaaaagctgatttatttagaatattgaactaaagatttcaatcaattaaaatcggtgaagttaagcattctatagacaaaacaatttgcattttctgacataatgcatacttttaaggaattgtgggactaaatccaaaggagtagggtgattatgctgacacatacaaaggcattttatagctgaccttatccatatcctgccaataagcccttaccttaaccaccgcattgtatgcaggcccaacttctacattatagaacctgagttcctttacttgagggctttctgtggccactgaatcccacttttgcacttgtgtggtaggcttgcaagtactgggaaattaacatttccccaacagcctttaacaattagggaagatgatacagaaataataccccaatttcttcacccctgaatgggataacccgcaggcatatatttctcagggctttctaacaggattaaactctagtcattaacagtgtttgctgggattaataagtatgcccatatggatgtctcttccctttcttgtctcaattccccattcagctaccagaatttcttttacatggcacacataaataaactacttatatttgaaagctaatgtcaggtttgacccctggaggaacacagactaaagatacagtgtgtatgtgtgtgtgtttctaaaatacatgtacgcatttgaagttaaggagtgtaaatgtctcccaaccgaagaccaccaccaactctcttgtagctgaacaagttgggttcattattttttgcaatgagggagaatacacaacatggaggccagggggtgcgtgtggatgaaaaaaaaaaaaaacattgtaggatttgtgcttgtgttaggggatttgagggagggtttaaaagctttactttggattgcttgtcattagtgtgtagggatagctatatgggtatcgtatcttgtccagaaggagagaagaccagaatgaggctaaagttgcaattaataaagaaacggcgttcgttcatattaaccaggataggagagtgttgggcgttttgtggtttgggtaatgttgatgtttttgtctggattcagacatgattatggaatgatcttgtcatggtcttgatccattatggaaacaaagtggccttttccaatgttgaaattctgtgaaacagtttattttccacttgagaagaccaaggcatagctgggtgtcaggccagcttctgatatcagcagctccttttttggtttctctttctctcatgtgttttcaattctcgaacgaaactttcttttatcaaaatatgttcctaaatatagcatcaaggggacctttctatgttaagtatcctttaacttaaataatgatatttgtgatggtttcaatattattcatccaagtaatttataagtgatttcaattctagactgccaaatattttttaacctagttaatattgaaatatttgtttcttgccttttccaaacaattgtatttatatcaatgtgtatatatttgaccacaaatccatacctccatgcagactacttttcagtctattcttgttacagatctgttgtattcttataataaattatttctttaactttccaatttcaactaaacttaaatttatggaagagactggagttcatattagatttatttttgtaattctcattctaactgggatgttgtgagaaagaaattatatgattcatagaaatgcattttggatgtaaagttattttcatgctattaagagagcattctttatttttcagagagctaaagaagaggcccaacaaaaagaagcgaaagtgaaactccttactgagtctgtaaatagtgtcatagctcaagctccacctgtagcacaagaggccttaaaaaaggaacttgaaactctaaccaccaactaccagtggctctgcactaggctgaatgggaaatgcaagactttggaagtcagttgcttttcttggtctttgtcaatgatatgtcaatacatggtcatatgtgaggcatagtggttaagaacatggataccagtgcaaaacaactttggcttgaattcctcattcaggcacttataagttgtatgactttgggccatttgcttaacttgtgtaaacctgttttcaatctgtcaactagacataatacataattcataagttgttgagaaaattaaatgagctattctctttaaactacttagcctagtactcaatatatgtgagtagctatgcttctaattctcattactattattaggtcataaaatcctataaattttctccagatttatagacaatgatctttattttttcttatttttgtatgtacataaacttatttaagtatctttggggaaaagcattctgtagagaagtatgtttttactacaattgtctttagtaattgccgtgccccatagagttctttgttagacatgttacctaaccagctctatattttttgatggtttgcattatatttatgtattatcacaacttctgctttaacttttatggatgggccttactgtctagattatgcttatctgaatttagataaagaaagcaggtgcctcaaatgatggccatgtaattgcatcaaaaataagctatgacctttcttatgaaaatactgtgccaaggggcacaaaactttatccactacaaatgctgatgctgccagacattgcacatgagttggactttaagcccccttccctcacacagactgagttattttggtgaatatggttaataaagtgttcaggtacctctttacttttgaaaaacattatttagtttgcttcctatgttgagggtttgatatttaaagaaagatacgattcagatcaataataaagtacacctttaaaaatattttaaaatgtatttgtagctaaagtaccccatatattcccaatacagtattatcattttccaattgtaaaatgtgatccgagtttctccattatcagttctaagctcttctttactcatccttattcttttcttttaaatgcaattcactcctcagactcttgaaaagtgccttctatatgtcaggaaatattacagtttctgaggatataatgacgtatcttatgtatcagtgttatgtgagtgctatataaaatataacaaagaatgggaagggaagggatctgatggcactgtacatgtctcaagaaaaccacaattaattcactaacatgttacaatagggagggactttttgtacccaggaaatgctttctgacaatgtttaaataaaacacctactattactttcttatgttcttaatgtccttaaataagcatcattgttccctattattcatgttgttcatttaaatgatactccgtgattcattagaaatttatattggagtacattttccgaagggattttcttaagttttcgtattaataacaaacttttcaagaccaattattggattatttttccatttccttctcatgtataataacatttctaacattccctattcatattgaagttatcaaattattgagttccattttagtcctttttcactggtttggaatatgtactttattttatcttataaatatttctctatacctctctaacaataatatggtggaaacattagcatagtttaactctgaacctacctcttccgttttccgcgttattgttgcctcatatttcattttcaccttatttcccccaaattagtccatataattgctgttgctgctgctgttgttttaactatttcatataatatttatttagatttaccgatgctattttcccagtttttgtgatcagttttgccttttgttcttccctttgcttctgtgttcagtttctttcttgctctttccttgagtgtgagtagcaaatgtgttcagattttacatattgaaaatgcctttattttgccctgagtattggataatgatgcagttgagcaggaaattatgtaaggacaggtttttttttttcctacaacactgaaaatattatttgtcttttgaaattttttgcctttaggaaatctgctgtcaagttattgtttctttatcattttctctggtacctttaaattttctcttcgtcctgtctgctctgcagtttcaccctattttgtcttctacagtttcactcaactttgtctgtgtgtaaatttgctttcatttatactttgtcacctggtgtgttaattagaacagatacgttatttctttagtggttctgcattgtctttgtgaagattttctttttcccaatctcttcattccttcctaagggaaaactttcttagagctattaagactatccccttcttatattccagttactggtttccctttaatattttctatattcttatctctatctgctcaattttggatacttttctaaaatctgtcttccaactctcaaattctcgcttcagctgcctgtggcgtaatttatccttcaatagagaaatagtctcatctttgtctgtatatatatttatctctctacatttatgtatgtgtgtttatattttttcaaaaaacatattttccatttctcaatattttattgagttgtttcacaaatctgttctttgttatggttttcttcttttttgtgattaattctatgtattcctttaaacaacttaaacagataccatctgtttgactgaaatgtttcaacttaatgagtaataaacatgacaccgtcttatttttccaataactacacccaactctgtcaaatttcaccttctgcctggtagttggcttctttaacaatatttctctgggatctcattactttttattcacttttagttattaaaatgtactctaatttaaatttaaatatcataacttaatcaaatatttcacaagtttagattaatctgttgcttcagcaatttatacagacgcaggagtgagaataaatggtctcacagtctcctcctccatcccagtttctggatacagatctactgtcgatataagggagggtgaagagggaaaaatactctcttcatgtgaaagtcctttttttgctgctcacaactgctgttcccttttgttaaaacccacacacatctataatgcctagtctgttgtccctcttctatatattatcaccactgacctggctcgttctctatagacttgattcgctctgttgaggatccagattggccttattcatatgagctttgaaccccccaaaaaagatctcctaggcttttatagtacctcgtagtgtttaacaagaatttcaagctgacgcttgtcaacagctttacacaaactgctcttgaatattatgtctttttaaccaatgctttagtgatgccctggagtctaatttacctaccatatctcaactcagagcctatgggcactggaagtacctatactccgtacctttcaggaatgagaagtttgaaagagttgtttttgattccttcttggccataccaacagctcaacaggaaatgaataccaaccaccccttcctgaatatatccacccagtagatgagtggttttgttttagatcctgtaaataaaatgattcagatgagtttaccctacctatccccataaaagggtgagaaagaagaattgcctaactattcaaactctcttcacctcactcccctcaagtctccgtcagctctctctgtttaaaccagggcttgtgaaaacaagaaagagatgatctcccaaaatgaaatgtaggcaaccaagccctttttcttaggtgtgaattccacttgccagtctcaagcaaataaactctatgggaaacatacaccatgaggctaggcatatttattgtacagttctccaaaattgttctattatctttatgtcataaggtatggattctaccatttgttacaactaatgactccctctaatggaagtgaatttccccatgtggctagtaaggtttttgtttgtttatttgtttatttgcgagctcatctataataggaattgcctttactggaatttttgtctttttttttctctgggctattgagtttttgtattgttgccatcaggattgtagagattttatgctctgccctcatgtgtgatacaagcttaagtttccgtttgttatgggtggatctttatttttcagcccaaaatcccccaacaatagtttccttgctaaatcataatattccaatggctagggatgttctacttcttccttacagggtggatggcacactgcttcattctttcccatttccctggcttgcctcatttcccatctcaagttagtgttaaatgccccagctttgatgtcgtataccctgttctgatacgccagtatttttataagcttgattttccactttctactttcatttccctctttttctttctcacacctgaggttctatatacatgttttacagatcagctatgaattaaaaatgtttcctttgtattttaacatgtattttggtataactgaagcaggatatgttgggagttacctcatcagctccatctactattttgaacagaagtttagttttttatttgtactttccttcaaagccactttggattctgtgatttcaaagtaattttaagatccaaactgttaagcttaacagttattctaagtggcttttagctccaattcgggcttcaagactatattttattttgcaaaggtgacctgtaaagctggtacattcagcctctccagctgtgtccttcagatgcattgaggacagaagaagctatccattctgacagttaaatcagcaaggtagttcattacctcaatctgcaccaaagttaataagacacattaccaatcacgtctccttgtcttcaaagctctaaggtaccctcgggtatttaagaagatatttatattttcccactgggatctttgcccagaatgaagacagcctgtagtccagcaggagctggaaatgacccagattttagatttctatcaccttttaaagcaaaacacttaatttcactttttgcaataaactgtacataagatatcaagcaggtatgaaaggttggtacgtttgccaagcaggtgagactgatacttttcatcagatagagatcgaatactctgtgtcattctaagggctatgaacatagagaactttgggaaatctgattaattttttagatccttctgaaataaatcttcctttcaagcctttaattttggtggtagtgaggcgggggcaggtggtagtaagtggtgatgattgctgcattgtgtttactgtacttataggttcattcaacagttacaaagctaacagaaaatgaccgttgttacattcttatcctctctcgcatcttcctatcttttccccaatagacataatcaccatctagaaagctacctttgttattcctttgtttaaaaaaaatccacacacatatgagtgaaaaaacaattgtgcttaatttcagtattacagtaatggtaaactataatatagtttttttagggctttgtctttcacccaacatatttgtgtctgagattcattcttatggttctttttgatgagatttttcattgtcacgtctgtattctctgtttaaagatgacggtatatttttccattctccttgcagtggacattatttccttttttttgattactacaaaaagggctgaaatgatcattgttgtaacagtcttgttatccatgttaaacagtttctctgaggatgcacatatcaaaaagtggagttgttgtcttgatgggtatgtgaatgttcaccttattgagaataacaaattgttttctgaaatggccatttcagtacacacacccaccaacaataaatacaaatttttgttcatgtatatcttctctcacacgtggaattgtcaaacttctcatttgtgtcaatcaacatggtatctcattgtaatcctggcctacatgtccttgattactaatgagattgaacatatcttcatgtttaatgtatatacatatttctctttaagattttggttcaggttttcttttcattatcgattgggttattcatcttctatttgacttgctggcatttttcatattcttatgtgttacagatgttgcagttgttttcttctattttgagtctgtttttcaattacttgatggtgtcctttgatgaatagaaggtcctaattttaatgtagtcgaatgtattcatctcttttttcttacggtcagttttttacgagatgtcttacttaagatattcttctctatgccaaagtcagaaatattttcttctatattttcttgtagaaattttaaagttctgcttttttatgagtacttctgtgtataaatcagtttcataatacaaattaatggccatttaaaataatcaaacctttgaattagtggtaatatttccgataatatacctcaaggaaataataagaatgtggaaaaatagtccatattcacgatgatgtttaccataaatttataatagcaaacaaaactaaaagtagtctatctaaaaaaaggaaattgctaaactaagatagagccactttaaagaagtcttagattttcattaaaaatatgtcttcttagtaatacagaaaatggtatgatataatgtttagtgaaaagagagctatagttaaactcacttaaattttaactatcaaattatatatgataaatttcagaggaggtcacagaatactggtaacagtgatgtgtgagggagttagatttacatatgcatttttacatatgcttttatttttctgtttcccagactgcaatgttggtgcttatttttattttaaaaagtaaattactgtcttttgaatttattcattattcatgtaataaaatgttttcttaatgacttttgattgtagaggtattagatgatgaaactgtctagctgcattttgaattacctgctacaaagtaaaggtgaaaaatacaaagtgttatattttcagaagttttaataatgaaatggcaaaatttcacatttacttttctaccataatatttaatctgtgatatatatttctttcttaggaagtttgggcatgttggcatgagttattgtcatacttggagaaagcaaacaagtggctaaatgaagtagaatttaaacttaaaaccactgaaaacattcctggcggagctgaggaaatctctgaggtgctagatgtaagttgtaaattaagccaaatgatgataatttatatgcagtattaaaagaggtcaagtaccaaatagaagacaaatccaaagaaaacaacccaagagagtataattactatgttatcactcagcactggtactttggataaagcctttgttccccctaataaccttctaggtcacaagattttgcaaagggtttaaatggcttctcacagaggaaatttgcctttattatatcactaagttctacatagatgcttcacctaattaaatgtaccacaaacctgcaaagacagtgtgaataaacaaactcactgctttagggctaatcgggatgataatatgaaatattatttccagtttaaaagctgcacgtattgaattggaacctattttatacttacttaaaatcacaaatttacaccttacggaatgttttgagttattaaatggatatgctttaatattggaaatatatctttaaagtattcataaaatgtaagtacatttttaagttttactttggagactttcaataattaaatgagtttgcatttataaacttgactttaacttctgacatttaatcattcaagctctatgcattttagtgtacttttgacttatctatatgtaatgaatatgttgttttagaatatgtaatatatgtacgtaaagctataagtagtatagcccctctgtaaatctataaaataaggagcataaattattcaagatgtgaagaaaatgtaaggtatttctttagacagaatagaatttgtaatcctagaacatcagagtagacacctatagatcattttatccaacttcctaattttcaaaaggaaattataaaacctgaaaagatattaaagtacaatgaagtagatctccagtggactttaattttggctctatctgactatgactataaatttgtcgtattcagagaagttaattgaccaaacatttcttgtgaatcagcaatgtgttacatgttctagaaaagttgcagcaaatttacagcacattaataaaaggacagtggccagaacagaagataggatgatgctgttagcctatgaaattgtcaaatcgtacatggagcaccatgctaaattcttgctctcacagtttcagtgatgtgctgaaaaactagggcatgttcacaaaggaatgttaaggaaagagagaaaatttgaagccataatgaagagcatttagaaaagatggggaaacaaaacttaccattactatttactattttagacgaggccctcacaatgcccacaacacagacaagcagggaggaggaaaattgcgagtgctcttatcttttatttctatgttgtggtcataatttcaaattgttcctaattcagataatggagccaataaatgaaattccacagtgaaaaaataaataaatacatacataaaattggctctttggtagtgttgctgatgcttatccaggaggacattttgagtgaaaagggctagatcaccacgtatcaaggatagaaaaactgcacgacttctaggttttcttgcaactcaagatatttataactgatcccttaattttgctttgttgcttttcatccacctttaaaaaaatttaacaaggtatatactttgttaagacttataaaataatgtatccattaaaattatttatatccattttgcaaataaatatttacaaaattaagatttgttagaagtaataaggaatataaattattaggaaaattattaacaatcacattgttctactcaaaaatttgatggcttttaaagtattttacaggttatagtgattttttttaatataaatgtatttaggaagtctctttattttcttgaaacttaataggacaatgtattgagtttgctcaaaattcaagaaaaatacataaacaggaaaaattacaaatatgtattggaagattttcatttttttaaaacaaggaaaacagaagatttaataaatttgtgagaacatatgcccatcacttattttatagatatgtttgaggtccagtaagatgaaattgaatcccttgttttctggcatgcctatgacactgagattcactttcatcatattatctagccaggcaactttgtcaattttgagcagtataggagatgggtattattgggatgtacgtaacagagaatcagacaacggtttaagctcacaaaatgatcttttctcaccacgaaaagaatagtgaagggaggttactcagggttgaggatggttcagccatattatgaggcgagtaggcactctctgctctctcttcctgagcatgaaggacctcacactcaaagtcattgcctcccagtgcaaagatgattgttatacctccaggccatgtatgtgcaaaaaagtaggaagggcaaaaggattcttcttgagagagtactctttttcagaattgtgtcacgtggacaccactagctatcagagaagttgagaaatttagtgttttacctcttctggttttagagttaggggacgtcaaggaaaaaggtggttgtgaatcaagttttaagttctcagtccgcaacactgtcataatcccatgaagattcatatagaatgacatcctattttttgaagcaaaaatgctccttggtgtttttaatcccaattaaaatttgctttaaattgattatgacttaattatatgtaaatcagaagatactgagcatttgctgataatccaatgtatttagaaaaaaaaggagaaatagtaattattgcaaatgtgtttcagtcacttgaaaatttgatgcgacattcagaggataacccaaatcagattcgcatattggcacagaccctaacagatggcggagtcatggatgagctaatcaatgaggaacttgagacatttaattctcgttggagggaactacatgaagaggtatgaagataagtgaaaaatctctttaatctaatttgcattaatgtatagcagatacaggcctctcagataaaatgagcaatagtttaaatattagctcagctttcaggtttcagagacaatccaatgccagacactgggtaaattctttacatgtgtattatagcatgtgatttcacaaaaacattgtaagttaggattcttaaaaggcaactgagacatcccaagaaggttactctgaccacagagttcttttccttactcaagatagaccagtatgtgtgggtatcctttctctctcgctgtctcattttattcctctccctccattccacacacatttgttatgtcacatgtaatctgctaataatacatgcaattctgttagtaccccatattatttattcttcataaataacactacatttcttatagataaattttcatatatcacacatggtgtgatttttcaaatcaaaactaaaacaaaatagcaaatttctcctagtcagtgttttgcatactatctcctaagaatggattatttgtcaagaagaaaacccattttataatgatgtttagttttatattcacttactgagtacatctactacatgtgagatatggttctatggtttgatgagtaggaaaaatttgctaaccttcataacttaaaaacattggttagttaaggaagagttactgatttcctagaatgtgcaagacataaaaacaaataatataacgtatgaagagaaaaaagagaataagggggggtagtaactagggtagtatgcatgaaaccattgactaatgacttattgaatagtcaatgtcggggaccttttgacatgcttacagattgaaaaggaacgccttgagtaggaaaacctcttctctatccaattctgaagagaagtatgtgagggtagggcagatatctgcaaatgtaccagcagcacctccagtcttgaatcctgggtggcatatccatattttatccaaatcaacataaggaattggggattggaaaaggggaattccaaacaatctctggtccttcatcattgttgcactattgctggatctgagtcaaatagatattgctatgtggcaagtaaattgaagatcatttcaatgtgggttgtgatatggaattggaatgtgtttttatttctatttgaatatcagtgtcaggtaggagacagcagttgcatcaaaaaattaaaagtcattgtgaaactgaccttggcttagctgtgaaaagactcaaatttttttttttttaaagacagggtcttgctctgtccctgagactggagtgcagtggcatgatcgtggctcactgtagcctcgacctccctgggctcaggtgatcttcccacctcagcctcctgagtagctgggactacaggtgcatgctgccactcccggttatttgtgtgtgtgtgtgtggaaatgttgttttgccatgttgtccaggctggtcttgaactcccgggctcaagctatccacttgccttggcctcccaaagtgctgggagatacacctggccaagatccaacttcagtgtttgacatttttcagtactcatctattctgtccttaggaatagcttactctctaacttgatcttggtattaactctattaatgtaattatattgcaatcctttattaacacaaaactacttataaccttctattttaaaggtttttggtataaaccctgacatttcccccaaagaaaaaataattcatttcagcaacataccctgattcaacacgtattatcttattttctggactgagtttttaaagcataaacttttgaataagaaaatacttgaaacttgggctagaataacaccttgtattagtagtcagggtccagacagggcacagaaaccactcagtcacttaaacagagatggtttaacacaaataagtattaactacttactggaaattaatttttaataggaaataaaagagatctctaaagaataccttaagcctgaggaatagtacacaaacaaggaactaatatggaaagataggagctcaacccaaggctggattcaaacttctttagaaagtgtgtgtctgcctcccatgggatgacagagaagtttccttcattgacccaatccagaacaagtctatagccagtgagctgaagctagtgtgaagagaatattggaggggaatgctgacaaaattcacagggaagtagcctatggtggggaaccattgaatttgctagaaagctgtctggtgtattcattggacatggtgggaaactacctgtagtggatgctactaaacttgaggaaatgaggtggggctccaggaagctgcctatggatttgccacccatcctcaatttgcttattgggtacccatagaacttgtcaaacacgacccatagtgttgctgaaagtcttctgggtaaagtggggtggatgaggtgagccttactgggcattccataggccagcccagagtcacaggtttgaaaaagaattaaaagcacactgggacagacaaacctctacctcccccattgtcactccagcatcctttactgacagaacttaatatcatgtcagctggcaaggggagaaatgttcccgtgtcaaaaacaggatcatgttgaaaggcaaaaaattgataactggcaaatccctctgtaattcactggctatgtgattttgagtaacagttttaaacttacgtttcctcatcctgtttcatagggggttttttttgtgagcaaaatataaaatacggcacttaaagtactatggttccaggaacacagtacatattcaataaattattcaataaatttaatacatgatcagcctttttattttgactagatgatattctagagtatcagccctcaaaaattgtgtgtgtgtgtttgtatgggtgtaaatatatatatatatatatatatgtaagtatatattaaaatatgtaaatatatatttaaaaatatgtaaatatacatatatatatatcccactgagggcagtgattggtaaataaatgcagatagtgcaatatgaaatataatgaaatgcacatgcctccattagttaaataaaatgtgaagacagataaaaaggatttttatcaccctctaagtcttaaaatcagaagctctccacttgtacctcaatgattaagcagagtgttaaaataacaataaatctaaaataagtaaacttgaaactattatcagtcctagctgtgtttatattacatatttggccagtaataacctgggagttatttgacaatgaaaataaagcatatttagtttttacggctttcatgaaaaccacatcatgttaaacataatatccttctcaaattctgttgtatcagcctgtgataagctgattagacctgaaagatacaatgttaaattaaaacaatgtgtagtaataggacttttgtatttctcaggctttgctcagcactttgatcaatttcaaactacttaggtaaaaaagacacacctaataatttattagctaaatcaatcctttggatatttccactatctagttaaaaagactgttgtttcgatgcagtagaataagccttgggataaattatctgagaggctgaagaaacaaaatgattacagtaactgagtttttaaatcaatttaaaaaattcttgttgtacattaatgtgttataatcaagaattctgaatttgttttaggccatgattctcttgatttttggttggttaaacaaaaaagtttttattttgtggttattttctatttttattttattttatttttttgagacagagtctctccctgaagcccaggctggagtgcaatggcacgatcttggctcactgcaacctctgcctcctgggttcaagcaattctcctgcctcagccagatttgctattaataaacaaagtgccttttaatttgaagatgagccttaacctattttttaaaatcaattaagtgcctatgtcagaggtttgtgaggtttttatatcacctacctaatgtttcttatagctgcaattatgcagaactaaggtaacattcaattgcctgttaaatcagtcaaacagccagacttttattgcctatgaatatttaaaagagatttgctagatcccatccctaatttcagagtgtgagtttgcattcaaataagtaataaattatttccatcacttcaaaaggcatctttcattcttgataatcatatagcactatattttctactcacagtaatgatttgaaagatggttagcaaaccaggcaacatctccaacagacgtaccaaatcatatcatttttacaactattgtaatagctttattctctaacagggtaaccaagcagcagaagatgatttagtaatacaacaaaatgaataataatattggtaatagtatttggttacagaggctcaggtacccttttaattgtcagatatgcattttctcatttagttctcacaatagccttatgatacatggtggtttttgtttttgttttttctttttttgagatggagtctttccctgttgcccaggctagagtacaagggtgcaatctcagctcactgcaacctcctcctcccgggttcaagcgattatcttgcctcagcctcccgagtagctgggattactggcacatgccactacgccaggctaatttttgtatttttagtagagatggagcttcaccatgttggccaggctggcctcaaacacctgacctcaggttatccgcccgcctcggcctcccaaagtgcttgaattacaggcgtgagccaccgcatccggccgatatatggtttttcatattcccattctacagaaattgaaaggatattaaaggccctaggaaaaagctattgagcatttagacccatctctttacacttgaagcctaggcacgtgaccatttggctacactacctccaatctctgtgacccttttcatatattaaaaataaaaactctgctaataagtgaatatggcaattaacgagtttccccgtttttaaggaaagcttaaaacatggccttaaaagtattatggctgactaattaaaataaaatttagagtcttaaatattaaagtcacacattgagaagtccaaagcctttaccacttctcttgatgagtgattatttcacctctttcgtggcttattaatgcccgtatttcagtccctttcaaagatgtctgtaagttgttatgcctgacatgaaatagcaaatttactgaaagggacaaaatctaaattggttaattcttctgtaatagtaacatttatgatagactcagagagggccgtattaatttttcctggtaattatgactttgaatttttccctcagtgtcacatctaccttagcatagatagaccagaacggaagaacattgcttgaaggaagactataaagtaatctaggaaaataagtggcatattatgctttattaatttgtcaatatgttttgtagacaatatctgtctataataatagtaaaagccattactttttgagcacagttttacgtcagtccttttgctaagccgttagaagcaacatcaaacttaaatcccacatttgctttatgaaatagatttgattagcttacttcacagttgttgtgatagggctgacttctgttctcaagggctaggacagctaagtcttctgtaatgccctctggaaagcactaggatgctggaaaatgtctagtagttgtattttatgttgctttcaaagaagtataagtaaacctttaaaggctaggaaaaaaatcagatgaaactgaagtcatgccgtaacatgcctatgaccactgacatttgtatggtggagataaaagctaagactgggaaccccaattttaggtgaattaagtcatttgatggaaaagaaatatgatcctctggctcacgaaaatggtggagctaaacacagattccacataaaactggggttctatcagtaagataatgggcagagagaattctatctgcagagagaacaaacataaaaagacatctgtcttctcactgtgagtgcaaagtaatagaataattataataatgtcacctgaaaatgtgtgttggcctattcttgtaaggtgaggaactcttgagtgtatattatcacaaagggtaaagaaatatccaaacaagtgattaagtcagggtagcaccaggttaggagcgtcctagcattagttagaagcaaatgcaaattgtttaccatgaaaagtgccctcagtgtcctcacagattaaactcaggggaacttgagctcatcataaacacatagacatacacacactcactcacacgcacaagaaaagccctcatgaagcacagtcagcctatacaacgaacggtgagtttacttctagaattccggatattagaattgcaagatgtatagtataaaataaataggtaaaatattatagaaataaatgttattgaagttataaaaaagaaaacattgtaaaaatggaataaagaaatcaaaattaaacaactacaattaaaaattagaaaatgaatatatcatatataaacatattagttgaaagaaatgatttaaaagaaaactaaaagagaatgtacagactgtgttaccaaaaactaaggaggtggaagatgtgaacaataggtaatagatacaggggtggggagtagaatatgaacatataacttatctcaatgggagttttcaaagaggagaataaagaaaatggagattattattattcaatataaaaaaattatataacccaatttaaaaatgagcagttgagctcaaaaggcatttcttcaatgaagacctacatatggccaacatatatatgaaaaggtgctcaaactcattaatcatcagggctatgtaaatcaaaaccacaatgatatatgtcttcacatctgttagaatggcagttacttaaaaagaaaatcaagagatgacaagtttggcaagaatgtggagaaaagggccccttgtaccctgatggcaggaatgttaattcatgctgacactatggaaaacagtatggagattcctcaaaaaaaaaattaaaaatagaattactatatgatccagcaattccacttctagggatatatccaaaggaaattgaatgagaatcacaaggagattatctgcactctattgtttattgcagcattatttacaatagcaaagatatagagacaacctaaatgtccattgacaggtgaaaggaaaaagaaaatgtgatatatacatacaatgaaatattattcagcccttaaaaaataagcaaatcctaccatttcgctgtaacaacatggataaacctggaggacattatgctacatgaagtaagccagacatagaaagacaaataatacatgatcccaatcatattatgaatctaatacagtcaaactaatggaaggagaatgtggaatgcttcctgccaggggctaggggaagggaaaaatggagagatatttgtaaaagggtacaatgtttaggttatacaatatagataattcctagagatctactgtaaagcatattgcctatagttagtctatttacttaaactttgctaagaggatagaccttatgttaagtgttctgttacagaataataataatattagaataggaggaaagttttggagatgatgaataggtttatgtcatagattgaggtaatgtttttatcagtgtatatttatctccaaactcagcaacttgtgtatgttaattatatacagctttcttgtatgtcataatttttttgagaaatggagatggagtaatatatgaaggatattaaaggaaagtttccaagagccagtgacataaaccacttaaacagaaagcacattatataacaggcaaagtaaataaatagaaatccaatctcagacatatcacagtgaaagtgcagaaatccaaagacaaatttatattagcagctagaggtgagatggataacctacaaagcaattaaatttaggctgtcattagacttcttatctacaacaatgaataagaataaaaaagcaatggaaaatattttcaagatattgaaaaaattaccgtcaacctagaattctgaactcaacaaaattagttcttcagagtaagaggaaattagacattatcagagtgaaaaaaaagtgaaattttaccccaatagacccttactataaaaatgtctaaaataagtatgaagaattagaagtagtagaaaaataagttttaaaggttttagatgcaataagtatgatgaaaaaatagttaagcttttaaatacaaaaggcatttgttgcaaaaaatatataagaatatctaatttcatttaaaataatgttgatctaaaatactagattaaaaacaatatggaggggagttacagccacaagcccttttatttagaaagagggtagagatagtgattaaatgtcgactttatgctgtaataaattgtcaaggataaccactaatggagcatccacctgggaaacaatcaaagaatgataaaaggaacagttctcaatcagtacgcagtaaagcaagaaagaaggaaaacaaaacagaaaaatgtgagatgagcataaaataaaagaaaagatggtagaaaaatagaaatagaaaaaaatagatggtagaaaaataccagcggccgggcgtggtagctcatgccttaatcccagcactttgggaggccaaggcaggcagaccaggctgccaacaaggtgatacctggtctctaccacaaatacaaaaaaaaaaaaaaaaaaaaaaaacccaaaaaaaagtatccaggcttggtggtgggtgcctataatcccaactactcgggaggctgagacaggagaatcacttgaacccagggaacggaagttgcagtgagctgagatcatgccatttcactccagactgggtgaaagagcaaaactctgcctcaaaaaaaaaaaaaaaaaaggaaagaaaagaaaaagaaaaaaaaaatacatctgtagtcctagaactatttgctcaatacatttaatatataaatgtagaaattttcagaataaagcatcaaaattcaaaatacattgtttttaagaaatacataaagacacatatatcgaaaatggaaacagattttccgaaaaggattaatcaataaaaagcttagacacctaatttatttccagcaaaatagacattatggtcattatcattattaggcaaaaaatggagtaaaatataacagttctaaaacttgtacatacctggccgggcatggtggctcacgcctctaatcccagcactttgagaggccgaggtgggtggctcacctgaggtcaggagttcgagaccaatctgggcagcatggtgaaaccccgtctctgctaaaaatacaaaaattaaccagctgtggtggtgcacgcctgtagtcccagctgcttgggaggctgaggtgggagaattgcttgaatctgggaggcagaggttgcagtgagctgagattgcagtctccactccagcctgggttacggagtgagactctgtcaaaagaaacaaaaaaatctcgtacatacctgggaaaatacctttaaaacacgtaaagcaaaaatccacagaataacaagaagaaatacacaactatatcagcatggtgggagatttcataatgcctctttctttcaagacaccagacaaaagttagtgaagatagtgatgattaacagttgataaggtggatataaagactgtatagagaaccccaaatcagagtgtaaatttcatctgaagtacatggaaatgtcaatacatttcacatatttggtattattagggaaatactcttaaatttgtaacaagctagaatcaatagtaaaaacttgactaaagtaaataatttgtggatcaaagatgaattcaaaatggatggttaaaattcatagaaccgagtgataataaaaataaaaattaaaactaattggttcctgttaatttttgtagaagagacggaagggctgaaaactagtgagctaactgcccatctcaagaaaatagggaaaagtataataaatgcagagaaagtaaatggaaagagaagaattcaagagcagaaataaataaaaacaacatggaatcaataaaatttaaatgcccatattcatgttttaattagacaaatcaactgagagggaagtaaaaacaaatataaaatcttaaggatgaaaatgttataactacagttataatatatttttaaaatacagaaaatactaaaagctatgcaaataagtttagaaacttacatgaaatggatgaatttctaggagaatattgctacaaaaatgatggaaggggatatagaaagcctgaggagacagaaatttaatcacaaattaaaagtcttcctacaaagactatattagactgaaattattttacattcaaatttgaacacactttctaggaatagataattccagtcatcaacaaactcagtagaacatacaaggcaatatacatgtctggaaaatataaggttagaaaatttttttttttttttaccaaaatcagacaaaaatgaaacaggaaggaaaaccccatgccaatttcagtcataaattaataaggaaaagttctgaaacaaattattggccaactggatccaagtgtgtatgaaacagtgtttaagcttaatgttctccctttcctttctatattcactctttataatactttatgcagtgtcatggctttaaataaaatttacatgctaattattcccaaaatattatctctggcacagacttttgcccttaacttcagaccatatatccagccttctattgtgtatttttctctttggatatctcataggctactcaaacttaacatactcagatgacagctcctatcaaagctacccaacaccgttttctccacctctgttaatgccatctcattcctgaaatttctcataccaaaacttttaaaatgaactttgattcttgtctttctttaccagcctttctcttagcagatctgaaagatggtctcaacagatctagctgttgttttacttttatgttctgggtatatatgcaggtttgttatacaggtaaacagtgtgtcatggggggttggtgtacagattatttcatcacccaggtaataagcatactacctgataggtattttttctgatcctccccttcctcccattctctatcctcaagtaggacccagtgtctgttccctcattgtgtccatgtattctcattatttagctcccacttataagtgagaacatgtgatatttagttgtctgttcctgcattagtttgctaagtagaatggtctccagctccctccatgttcctgcaaaggacacgaactccttctttttgtggctgcgtagtgttccatggtgtatatgcaccacattttctttatctagtctaccatggagggcatttaggttgattctgtatctttgctattgtgaatagtgttgcaatgaacatatgtgtgcatgtgtctttgtggtagaacaatttgtattcctttggctatacacccggtaatggggttgctgtgttctgtttttagctctgccaaactgctttccacaagggctcaactaatttacacccccaccagcagtgtataaatgttctgttttctctgccatcccaacagcatctgttattttttgacattttaataatagccattttgactggtgcgagatggcatcttatcgtggttttaatgtgcacttctctaatggttggtgatattgagcattttttttcatattgttggccacatgtgtgtcgtcttgtgaaaaatgtgtgttcatgtcctttgcccatttttaatggagtagagtttttaaaataaatttgtttaagttacttagagattctggatgttaaacctttatcagattcacagtttgcaaaatatttctcccgttctgtagtttgtctgtttactctgttgacagagttcaacagaggaactctgtgaggaagttgtgtaatttaattaggtctcatttgtcagtgtttgcttttgttgcaattgcttttgacatcatcattacatcttttcccattcctatgtccaggatggtattgcctaggttatcctccagggtttttaaagttttgctttgacattttaagtctttcattcatcttgagttgatttttgtatatggtgtaaggttttattcttctgtatacggttagccagttatcccagcaccatttatggaatagggagtcctttcctcattgcttgcttttgtcggctttgtcgaagatcagaagggtataggtgtgtggcattatttctgggctttccattctgtttcattggtctatgtgactgtttttgtaccagtactgtgttgttttggttactgtagcactgtagtatagtttgaagtcagctaacatgatgcctccactagctgtatttctttgctccttctctcattaaatatagtctctgtgttccaaagtgaggaggaacaactgtgagattaagatttggtaaaagagaaaatgagcagggcaaatagagacaataaatctgtgatgatgaaaaaatgagaaagaaaggccagtaactgaaattgaatagtaatagggcagaaaagatgtgttgttgattttcaggataataaaaatttaagcatgtttgtagtataagggaagatccaatagaaagacataatatataagagcaaagtcttacaagataggatacacgagcaaaaaaaatggaaggattgactttggaagtgggaaagagaaaattgagataatacaaggaggttctgaggtggagagtagtaagtttgagaaagtttatccaccaaggataaatttatccctgagaagtaggtaactctgttttcaggttgtttaggactctgcacggtaaagggggttgggagaaaggagaactggtgtcattgaggaaatgagagtgaaaagtatttggaataggagctcttttgttttaaagattcgtttaaaatcaggagaagtgttagagaataatatcgtggactcagtagtagccaatgaagttattcgcaatggaaataatcagttatctgactttctcccgtaattttctgcaaaataattttatttagaaccacacacatacagccgcatagaaaatcaaaagcgaagggatttttctttgcgttatctttgattagcatctccaggttgtatttgattatattctgaaacaactaggattctagtctgaagtatcttcttccaactatattcatatttgcaagtcattcatctggttaccgccagtatgtcaaatgtgaatttcatgtatttttttttttttttttacaatctctctaacttaaccaatttaattcagatttttatgtcagtcttttagctgttggctgtttttcccaaaatgtcaggatcggctccataatttgggggactcagggaagaaagaaaatactgggtcccatactcaaaaattaagcattgtaagatggcaacagcagagcattaaaccaagcatgggctctcctaagcatgagttactgcataactgcacaggttgcatggctttgaagccaatttcgggtgtcatcttatacatttggttatttgtacacctgaaatgcttttgataaggtttgggagttaacaatttaggctcacttttatagattatcattacttgaaaatatttcattgaggataattaattaacaataaatgctttaatatttagaaaggtgaaatttaatcttattcttagtgtgttaataatggatatagcttctaggtttacatctttccatactttgaattcagggctttctttccttaagtagtaaaaaggatattggatatcttgaatcttgacttctcctaggttgaatgctctgcaaaaaacctttgtctttatataaaaattgcactgcaagcagactattatggcagacctctgtgttcaaggtgactgcaattttcagctgagtggtggactatgcaacttgttctcataataatattaattgaataaatggtcaagagtgattacattttgaggggaagaaacccacttgtgtaatatttacacatagataataaactcaatagcccagacctctttaatgtaagaaaaatagacatgaatgtgtatgctattttctttgtaaattagaaatttttccttctctatttcatgtatcttcttttgttatttgagaaagggatttttcttgtcctaccatcaattgtgtgagttaccttgattcttgtttttaataatattttaaaatacatcttgtattttaaatgtagttaccctctattttatagctacaggaactgaaagagtacatagccttcacaaaagggtctgtggtgaatgtgtttaattcttattttaatcaccatgaatcatggattttttctttgtaagtagtaattccattatttttagatataatttaccctacttcaatcaataatgtttccttggacagtcatatttacttttccgaaatattatataaaacagtagttaaatgtttttgttcgtctgtatgcctattatagaatattagcatttttggggtccagacacaaagggacacacaaacacatatatatacttgcatgtatttatatatacatgtatataagcacatatgtatacatataatcatgtactgcatttcaatatatgattaatatttaagtatttaatattcactctagacaaattatgtttgctcttggagggcattaatatctttgtgaatgagtgttaacatatccatttaatggtatcttgtcttcaaatatctcataatttgatagttgagttatttcttctgaagttggaatagcttttctacaagggcctaccaaaaaaaaaaaaaaagaataataaagttggaataacaaaagagggagttaatacataaaggaaaaccattaaggccgaaaaactaatcagttgtaaaagctaaatcagtagtatggattgataaagtagcattttagtgataaatttttggattgaagtttctcttttaagtttatcaatgtaccttttcagaaaaattcctcgagtttatatctttatgttaatgaaacttgtcaataactttaattatctatgatgattgacaactaatacttaatttctataacacacaatactgttctgagggtacatattcatctctctctttcatcttacgttttaccactctcaactttttaaaaccgttttctttgcaagctacttcatagattcttgagattgaataatcaaatctgttatttaatattcaggccaaatttctgaaaatgtttatttttttaaaaaaaatgataaatggaaaagggaatgttaaacaacatttctttgcagtgtattccagtgtccctagatggaatgaggaataaaaatatttttcaagttcatcatgctgtcttttaaatcataaaatgcatatatttattagtaatttttcattgaaagtatcaaagaaaattggagaatttccttactgtttctacctcactatgtttcgtatattctgaccagcattaataccaatttcatagcactctactgttcgctcttttttgctgtaagcccaactgattgcattttcttacctgttatttttcgttgttgttatttaagacatcttttctttctaacttcggtcttcatagaccttctcaatttcagctcatcaccaaaattacacagatagaagaatatagggactttggtgtacacatacccacttttgactccctctgattttctaatttagtagattttaattgaggctgagaactgtatttggaaaagttcattctgatgattattcaggtttgtgaaccccagtctagatagacctttatcagcacatgtataaggtgcactttgctaaggtgcattatgtgtcaggttcattcccactgtggaccagtaatttattcttgcccaaccactgctcatgacagatagatgatctctgtattccagaaatgaagctcctttccaattcctcaacaactaaaccaagcagaggaaaaagtggttttccttcacagccatagttccctgctgaagtagaatgaacgctttctaggaaactgcagcagatttttgatgacacggaaagggcatcactaggatcctcattatatattacctctctccctcacccgaaccacaatgttgacggaacagatacttcctgtggggaagatgctaagcagtcctgcatggctgtaggcattgtccacatcttaatcttcagctatatctgaggtatgacaagtttaacaatcctacaagttaaagcgtcacaccggaaacctgtttattcttctcccatgccaaataattccagcacgatgggtttcatctatagacgatgagaagatgccattgtggggtgaggacatagagaagagaggaagtttggaaccagtttatttctatttcagcaagcttaatgtattgtaagaacattttgtggcagatgaccctagtctgtaacaaggaatcgattgtaatgcatcattctgccagtgtttatctgttccctatgctcatataaacacacgagtcatctttctgcactcccaacctactcctaaagcactatacagaatgtttcgaaagcagaaggaaaagcagctgttccatacaccatgttcctgctgttcaaggtgcacatcccatccaaatgaatcatatcagagccaaagatcctggtaggagttcttttctacaaaactgcagtcttgtctatcctaacaacttggaggacaaaatattagaaaaccttgtaataaccttaggacacaataatgtagatactgactgagctagacctgaggactttttcaatgtagtgtggataagtaagatgacaggaagccataagcatactgtgccttgcacatcaacttctccagagccatgacaatcatctggagtatttgtgataaataaatattgttaatcttcatgtaattgggtaggatgaaaaaggaccagtcgtcccagacatcccaggagagaggagcatttttccagttgctcagatacaatttcaagttcgaaccaatatgaattacagttgaccacagaggccggcaaaatccatggcactgtagtccaagagaacctgaacactggccttagagtattatgagcctacatcacagtagaaggaatccagcagagatctctaatgcacatcagaaaagcaccatttctagttatcaaggctgtatttcacactgcttgactgaagattggaaactattttattcataggcaacctgtgtggccatccttacctggtctataaaaggaagtgtgatgaatttgcttcccatacatcatattaagtccagaaagccagagatgctgtgttgagtttctttcctgagagtctgaattcctaagtagagggactaacgagttccaaagttctttcactctgagatctttgtcacactactgtactgactggatatcactgaccttatttaagaggactatcaactggctagttcatctacattgtaaggactagtttgctcacaaccaccaacctatctgtaattggcctcagtatgctctctctcacttgggtacttctgtatttggctaattaacctataccacttggcttagaagcaccagctacattttttctaattttgacttctcatcttttccaacttgattttatccccagatttggacttttgtctcatgtataaactttatattttgcttgaacatgtggtctcaatgctgaccaagtcatccctagaatctgattctgtctcactattccatatcaggagacagcgacttaaatattttaattatttcctgtatcaataaattattcactgcctaaagtttagactttaataatatgaacacatgtgcagtcaaagagtacctcgccattgggccggaaaaatttcactgacttagggtggctcctgaaggtaccttgagaaagcttggatatgatgaatcctgtagacttattttatgtttactgaataatgcttcattcactttctttttgaagcttaaataaagcatcagtttgctcctgtcagggcagaagaccaatttcacttgtctacccatgaggataaatggatgcagcaagaatccagaaatgtcttagatatattactctatagctcattgaccattctatcaatgctcaatgctttacttgaaagtgatggctatctgatgtcaagttccattgataaaatgattcccaaacgttactttcaagtatgcttccttcagaggtcacagaagaacttcagtaacctgctaaaacctaaaacaggtgaagttcctattaaccatgacaccaagagttttcacatttatattctttcctggtaaagaaaattataggagctccatgctcacggcttttgagttttctcccaggtgtgttcaaacctagtgacattaacaaaacataaatctagaagcctttcgtgaataatgtaaccttctttattttatatttaaaggatatatatgcagacatgtacacatctttgtaattatttaccgcctatatccctattaaatacattaacaaatatgccacaggaaaaaccactgtaccaaagcccctcacaagagttatatttaaagtgggttaaagcaacatggttttaatttacttagtctttcttgtccaaggaacacagtgtgagacctcctttctttaggaaaaaataggatgaactaatttgaaaacaaagaaagcaacaaagtgaatcttgtgatgagctatgagcattggtaaattatttcttctgttgtaaattatcctcttctccctctgcttttctcttaatctccatttaattcccttttcaaaatcctaactctattctttttggaaaacatttcattaagctggtataagcatatctagacatctggaaatttttgtataacttttaaaggatctattacttaacaccatatgaaattatggaaaataaagtgttcctatctaatcaatctcaaagatttttcaagtgtacaatacaatgtgtgcttcaagtgtcagcttcttttttttttttttttttttttttttgagacagagtctcactctgtcacccagactgtagtgcaatggcacgatctcagctcactgccagctctacctcccgggttcacaccattctcctgcctcagcctcctgcgtagctgggactacaggcgcctgccaccatgccaggctaattttttgtatttttagtagaaacagggtttcaccgtgtcagccaggatggtttcgatctcctgaagtgtcaacttctttaaggctgtcatcttgccggttctaaacaactaaaaattgtaagaaccaatttctgagacaaatagaacattcttagtggtccttaaataattcctgatacttttatggcatgcttctttaaagaccttagaattatgcttcaggaatttaaattggttgttcagcaaagttaccaatcagtaggcaagttgttgcatttgacaggagcaatagttttcacgtggattatttatattcatgtatgttggtagacggatataaaacatgcaacttgcagttgcatgagacaaaagcatcaacatatctatcttagcttttcaatcatgtgatactactataatgctccatttttcacagatatttcttaagttctttatctcttcagacctcccgtaaaccattttctgtcttctgctggaccacattctagatgatctggatgtctatcattctcctttgcctttgctttatttgagtaagtgctgaattcgtggactgtgttagtagtttgatgcgtagtttcagccagatagatcagaaacatgaaatgcttttacatcatccaggtagatggcgccatgaatagatccctttgctttctggcctctgaggtaataaagacttaaatctaattgggttcagcttaaaatctcaatgtcatatttaatttaatatgcttccttgtttccagctcaagcttaagccatggtctaaaagactttctctggaaggcaagtgtggttagattccatcttacacctccactgcctctttttcttttttttttttttaactgcacttcagttatattattctccaatgtcttgggaagtaggagttaaggaaaataggcaaatgtctcctgttaactagctatttgtagctttgagtttatgatttgtgtgtgtgtgtgtgtgtgtgtaacagagatacaaagttcgggtttatttggggtacaagtatgggatctttaagaagtcttgcagaagctcttttgttttccccatctttaagaaggaaaatatgctctataaaaacatcttcaagcctcttgatcctgaggtactcttgctccataaagagtgttcctggtagatagctcaaacatggctgtcttcttccacgttcacttgacctattgagaaacgtttgccacaccaagcactggggagtacaggctgccccccttcttcactgtatcatttctcattcattttttacctatcaagtaggcatataatttctgaagcagacatcttcagaagcagagttggtaattaggtgtcatccctatctactctggactcccagaccctgtgatcagtggtcttggagctccacttacttgcatgggacaaaaaggttgaagtaccatcttcttttcccccttacggaataaacagagggagccatccctactctccctctgggccatgaattcagaagaccgattctttctaaaaccttcagagagttttagtataagtgggtatggtggagcaacaaaggcagggccagttttcccagctcttttgtaagccctttgctatgccctgctatttccatctcttagaatgagagagacttattacttgttattttcagtttaagactatacccaaaattctaagacaacagatagaattcaatgcattcatatccatagtgacagtttcacacttgctcttaagttaaatagaagagttaggtcaggaggaaatagtttatcaaaaatgatatacacccaccagtattcttagtacttggcacttgaacaaattgcaacctgttagtaggtaaaaaagaaacactaaaaggaaatagttggaccactgaactattgcttgatccactgaagcaagtgttgcttggtccactgaagttgagactctgggaaagaaaacttgactggtaaactctgtgaagtgaagcgtggttgtcaaatggagattaatgtcctctcatgggtctccactgtagtttctgaagggcaggttgagtaggatttggttttagcacatctcttgcaggactcctatcccaagacactttctataaaataaaacatattccatattgctctactttctgcaaggtacggacagtcaggttggggccaattaatgcactaccctaagcagaaacttcaagactttgtcgttgctttgctttatttgaattggaatttgggatttagttttcgttagttcatttactactaaaatcactcataaaaatgagggctttattttgacattggcaaaaatccttctttactcagaagaaaatatttaaaactgctggaaattgaaatgttttacatgtctacatcacaatgatgaatacaatgatgagtatttaaacaccaaaaataaaagtgtcttattacgagatgattgtaaacagtgcacccacattcttaatccatttgcaagcataagcttacccatcacctcataaatgcagtaaaattgctttttgtattgagtttaataagtatagtataggatacctagctcctttaatgaatgtgttttttgtaaaatattattaaatgattttttttctaatttggctttttaaagcatgcattcatatgttaaatacattttttggtttcaatattcggttttttatttcacatgcagagttttctcttccagagtttcttagacatgctacactttgatttatgtgtttgtaatattgtggtacaaaggttagtacattatttttaaaatggaaatgtgagaaactgtcaattcattgtagagatgactttacattgccagcaaaactcattaaactcttaaaactttttcttaaacttattttatatttccatagtactttaaagatataaaataattaatttgtgttaacttttacttagttttaattttcattgaaaactgggttaaaatatattatgtgtttttcttggtaaccattactaggattgttttctatttttatatttttgtcattgatcgccagttattaaaagatgtctttctaactttccttatatttgctgtttctgtctagctatataattcctcttactgctaagtggattagctaaagacatgaaataacattttaaaacaacagcggaacagtattctggaacaacaacaaaaaatcagattatggttgaagactttctacaaacttcattcaatgagacagcacaggtcaagcgggcagaaagtcagaaaattcataagcctgacattccatcagggtgcgcctaatcagatgtttagaaatagaaggcagcttatgccatgactagttgaaagaattctgcaagcttgcattgacatgaggtcttttcaatgactgagataatcaaggaatctgtgtaaatcagcctctcttattgactgtcaggccaggaaaagagccaacccacccgaagtcaactctgccatcatttcttaagccacactgttcctttcagctcatagaatctcatgaatagaaaaagttaggtttctaaaaagaattttgaggctagatatgtggtttaatgttattctatattacatcctatacaattaaaatctacagatgtgccttgtagagtacactgtttttgcctttagccagaggaaggaccaaatttaatacctggctaggcaattattacacgctgtgattggaagttttctccaaccacctgtcacaatgctgaaattttatcactagagatccatttctttggaagagctgtgggtaggctgcagccagtctcctctgcaatagaggctctgattatagccctgaacactgttatctgaaatagtaaattacctgatgtaaattttagttgaaattttgactgagaacaaaaggaagctatgtttgaattggaatatagggcaaagcctcggtcaccaatcttggatacagaattttaatagaaagagattaaaattttctccaaataatgtcccacccccattctgacacttttaatacaaaaacagatagatttattgtccaaaagatacatctctgagcagtggtgacctttgtttacaatttcttctgtaaatccattttcgtctttgactatttaaagttttctgtttttctcattaaaatttctccttatacttttcacccagtcataaataaagctattgggcttcattctaggaactggtattgagcaatgaacaggacagccgtaatccttgaactcattagagttgatagtctaaagtaaatgcagaccattaatgggagattaaatatgttatggcacatacaaagtgcaagaaagaacataatgtcatgtgagggaatgcataaatagcttaatttagccatcccgtaacatattcatatattaaaacatcatgttacgtgctctaacttgatagaatttttacttgtcaaatcaaaaaaatacaaaattcaaagaacatgcaagaattacctccctgaacttagaaggtgccagaggtagccacttggaagagatgtccactacattaagaagataaatgtaaattagccaataaaaggaagtcagaattgagattatgccagtaaaagggaacaacatgtttaaggccaagaatcaagagggccacagtgtaggttgggaaataaaaaataaaatttctgtatagctagagcagggagtaaaagacaccagcaggacttatattatgaagggacttttaagccacattaaggataaagcttttggctgcgcgcaatgtctcacgcctataatcccagcacttagggaggccgaggtgggtggatcatcttaggtcaggagtttgagaccagcctgggcaaattggtgaaaccctgtctctactaaaaatacaaaaattcgccaggcatggtggcaggtacctgtaatcccagctacttgagaggctgaggcaggagaatcacttgaaccagggaggcagaggttgcagtgagcagagattgtgccactgcactccagtctgggtgacagagagagactccgcctccatctcaaaaaaaaaaaaaaaaaaaaaagaatagagcttttatttgaaggacagtaaagaatcactagagaattttagacaggaagccccaattcgttattgagagaacacattgcagctgctttacaggtgggatgtggcagagtaaaatgccagtgaagaaactgatagcatatttgaggtaagatatagtaatgattttaactagagtaaagacaatggagagagagagaaaagattggaatcaagaactatttagaaggtataataaataattagtgattgactgattagatgcaacatgatgaaggacatgatagaggaagtagaaatatctagaattacatctaataaagggaatcattatttgtttttcgctgaaaccggaaaaaatacagagaaggaggaaaagcaagttggggagttgagaagtaggtgagaagagtatatgcaaggagttcatgtgtgggagtgttagcttttggtggttgcagaatattcatgaggagatgtccaatagggtgagataacatgcaagtatggagatcaaggggagatctggacttgagagatgtagagttgagagttgtcagaatgtgaggaggaattgaagttaaggtatgggtagaatgagaagaaaggaaagcccaggataaaatcttaatggagtcaaaatttatggtacagggagaagtactgggaaagccttccctcttcctgcagcatcactaaacttcctgttcttttgccttagtctagatgcctttaactgtagttttacttgggcaaagctgtgttataggctggcttcactgaagaataatgacatcactaatatttttaaagcttaaaaagtatagtatttatgtaatatctaatattctatatataatataaaaaccaagatcatcttaaaacctcagtcatgctctgtgggaaagaaagttatattgtacctgataatcatgcctttacattgtatattaaggaaatgtattttaaatgacacataatgaattcccaataagttgcctgccctatttcttacttttacaactactctgttaaaagtgaacagatccttgaagggagactttccaatctgtgcagcatggtatttatacttgaacattattgaattatcctaatcatacttatagttacaatcaagattaattgcagctatattaggattacttattattttttctacttcagcagtaacataaacccaattgtacaaacaatttctgtaatccaaattgtgaaagaaagtagggagaaaaaagatcatgcaaagctggttgaaatagtattcaaaataaatctttaaccagactgttatctaaaattctgtttttgacaaggagctgattctgaacagattgtacatgtatctcactggtggaagcagattatctgtcttgaattggattgtgatgacgatgaccctattctaagcaaaccaaatctcttgaactatataatgagatcaggaggaacattcgacctgagaaagacagattgcaatgactgagatgattttgctaattttttttccagcctatttccttaatgtacgtgatattgtgattgattttcatgcagagatccctgatcctatagttttgtttgctatttatttttctccttcacattttttttctatcaacagagctgaatgagtgccaggaagctgcgaaatctgtcttacaaaaaggtgattgtggaagagtctagaatcttcatttattgttcagcaggattacagaaaagctatcaagagtaaacatttaactgatacactcttattccttctttttaggctgtaaggaggcaaaagttgcttgaacagagcatccagtctgcccaggagactgaaaaatccttacacttaatccaggagtccctcacattcattgacaagcagttggcagcttatattgcagacaaggtggacgcagctcaaatgcctcaggaagcccaggcaagtacatctgggaatcagcttccattcttttgtttttattacttcaacaaaatgttgcagtgtttctaactttaaatttattcaactagttttccatggggttgttttgattcactgatttgactatttggaggtaggtaggaagaaaagggggtctagatcattagtctaagatttatttttttaaggatgtaatggaggaatttgaaataaagacatttcaaagacaggagcaatacgttctggtgtttctgacttcaaactatactaaaagctagagtaaaaccataggatagtaaatggtaaagaaaatgttttttggccgggtgtggtggctcacacctgtaatcccagccctttgggatgctgaggcccacgaatcacaatgtcaggagttcaagaccagcctggccaacatggtgaaaccctgtctctactaaaaatacaaaaattagccaggtttgttggcacgcgcctgtaatcccagctactcgggaggctgaggcaggagaatcacttgaacacgggaggcggaggttgcagtgagccgagattgcaccactgtactccagcctggaacagagcgagactctatcttataaaaagaaaaaaagaaaatattttctatggcattgttggaaagcagtctcaaacattttattataaactcctcgtttagtcacatggtctatattgttttataaaaatgtgttagttacaagcagtgagtaacacaaaattatcgatataaatttacacctcaattattaatgatcatgctcaatatagctacatgcactcactcccatgcttcattcaaacgaaaatataaaacgtgtttacctgtttttctagaatgagaattaaaatagtgttgaaaataaatctgagttgacttttaaatgagtaaattttaggccataactaaatttacattcactgtaagaagtatttttaaaatgctgttctcattttttaattaacatttaaacatatgtgaagttatcataggtattatttattcaaaagtctttagggttgtgtgatcgcaattactagatctgcttttcaaatcttatatacatgttgtgaacccaatcaccaagtccatgctatgatgagaggagcactagaaggttagctgcaaatctcaaagccttctccctgccagttggtgaagatgtctgaagtttttcactttaaaatgaatttgggggtgatatattagatttgtagatcatggttacaatgcaattacagttaatgaatcaccgttaataggtgttctgggcaacagtatacacaatagcatgagttaatttaccatattgtctaactttgaccaagaatgtccctgataatatgtggcagagtataggtagttttgataggcttaaaaagtccagggaatattatttccttatggagtgcatacaattgcaatagtggatgaagaaagagaattttggggagaatcctgatgataaaatcctcatcatagttttccactgggcaacaagagtaaatattgtagtagaagtgagggataatagtaaacatacttgaggattcaatttttaatttgtcttgatatataatgattgtacatattttagagggtaagtgtgataggtttatacaaacctactccagtatatatatttttcaaacttacacaagccaggttctctagaattaactattcctaagtccgtcccagtttgagtcataatgaaaaaggttttttgatataaaatatttatacatatttatggatacaacatttatgtaatattttcttacatgtatagaaagtgtaatgatcaagtcagggtatttagtgtgtctaccacggcagggtttagtaaaatgcatgataggaatgagtaattgtttctgaattgagaagaactacatgactataaatgaaatacagagtagaactgctttcatttaaactaatgacatgagttttgaaggaatgtttgattaaaaatgcttgtgacgttctgaatggaattaaggaaaaatttgagcagtatgaatactagacattaatattgcaagtttgtacttcaaaatgcataaagaattactttgtgacagacttgcggaatgaaattatgagtagcaaatttgataggcaaagctattatactattgtctttcaaggaaaattggagcttttagggcgaagcatctttagttgaacaggttgtgataaggggcactgtgtgttttttcttatttagaaatggattcaggattttataaacattacttgtttttaatagcaaaatattttgcttggtttttctaaaaaaatactacaataaaaatgttattaactacatcagtagaaaagtactagtaaacagcagaacacagataaattatgaaatttcagatctacttcaagaaagagattttgggcattcagatcaaatctattttccatgcatttcaggtcacacctgcattatcaacatagttcttgacattgagtctccccaatggtaatacataatattggagaatacaagccatctgaaagctcttaaaacattcttctgctccagggttttattttaatatggcagtaagtgaattgttttctagaacagagttctcaggtactcagatttgcttcaaggattatatttcctgaaaagcagctcgaaattcccatgaaataaaatagagagtcaaaagttagatagtgaaataacataagcacagtgtgtaagatgaaggatccactaagaatgccaccaaaatgacattttaaatatagagatggggtggatagatggatggatgtatggattgatggatggatagatagatagatagatagatagatagatagatagatagatagatgaaagaaagaaaagaaaggaatagaatagggactaacttcaatgcattgtattaacaaaaatgtgtttctataaatttgcacttaaagataaaaaggttattgctaattaaaatattagtgcactataatttcttttctcataaatggtatatttagcttaattcatcacggagaagcaggaaaaaatgtatgaagttaccatattaagtcctctttgaaatacctgctcagattttctgtcatatactggtcacgcagatttgtgggtgtctgactccaccgtgtggtgcactgagagttttgctagttaatttgaatcttttagagcattattttttctgcattttaagatcgtttgagatcctcagatataaaagctatggcactaaggaaatgcatactgtatgtacaactttctgacaaccatactcttgttatatataaaagtagatgtagatcaggatgcttctttacattcacattggcatttattactataggaaagaaaagagctgctcacttccttagtgtgttaattgatcagttatttctctgggccctcagattctgaattggatttaaaattatgttacttattttagtgacatgagcttacctacagaagcaaagcttacacttttagaaaataaagctgcatgctgccaggatgtaacagcatgtgttgacctaggagtattttatttcaaaagataacacttagccaattcacagtctttttttttaatactttaagttttagggtacatgtgcacaacgtgcaggttagttgcatatgtatacatgtgccatgttggtgtgctacacccattaactcgtcatttaacattaggtatatctcctaatgctatccctcccccctccccccaccccacaacattccctggtgtgtgatgttccccttcctgtgtccatgtgttctcattgttcaattcccacctatgagtgagaacatgcggtgtttggttttttgtccttgcgatagtttgctgagaatgatggtttccagcttcatccatgtccctacaaaggacatgaactcatccttttttatggctgcatagtattccaaggtgtatatgtgccacattttctaaatccattgtatcattgtgagacatttgggttggttccaagtctttgctattgagaatagtgccgcaataaacatacgtgtgcatgtgtctttatagcagcatgatttataatcctttgggtatatacccagtaacgggatggctgggtcaaatggtatttctagttctagatccctgaggaatcgccacagtgacttccacaatggttgaactagtttacagtcccaccaacagtgtaaaagtgttcctatttctccacatcctctccagcacctgttgtttcctgactttttaatgatcgccattctaactggtgtgagatggtatctcgttgttttgatttgcatttctctgatggccagtgatgatgagcatttttttatgtgtcttttggctgcataaatgtcttcttttgagaagtgtctgttcatatccttcacccacttgttgatggggttgtttgcttttttcttgtacatttgtttgagttcattgtagattctggatattagccctttgtcagaggagtaggttgcgaaaatcttctcccattctgtaggttgcctgttcactctgatggtagtttcttttgctgtgcagaagctctttagtttaattagatcccatttgtcaattttggcttttgttgccattgcttttgttgttttcgtcatgaagtccttgcccgtgcctatgtcctgaatggtaatgcctaggttttcttctagggtttttatggttttaagtctaacatgtaagtctttaatccatcttgagttaatttttgtataaggtgtaaggaagggatccagtttcagctttctacatatggctagccagttttcccagcaccatttattaaatagggaatcgtttccccatttcttgtttttgtgaggtttgtcaaagatcagatagttgtagatatgtggcattatttatgagggctttgttctgttccattgatctatatctctgttttggtaccagtaccatgctgttttggttactgtagccttgtaatatacagaaaaagagaattttagaccaatatccctgatgaacatcgatgcaaaaatcctcaataaaatactggcaaaccgaatccagcagcacatcaaaaagcttatgcaccatgaccaagtgggcttcatccctgggatgcaaggctggttcaatatatgcaaatcaataaacgtaatccagcatataaacagaaccaatcacaaataccacatgattatctcaatagatccagaaaaggcctttgacaatattcaactacccctcatgctaaaaattctcaataaattaggtattgatgggacaaatctcaaaataataagagctatctatgatgaacccacagccaatatcatactgaatgggcaaaaactggaagcattccctttgaaaactggcacaagacaggggtgccctctctcactgctcctattcaacatactgttggaagttctggccagggcaattaggcaggagaaggaaataaagggtattcaatcaggaaaagaggaagtcaaattgttcctgtttgcagatgacatgattgtatatctagaaaaccccattgtctcagcccaaaatctccttaagctgataagcaacttcagcaaagtctcagcatgcaaaatcaatgtgcaaaaatcacaagcattcttatacaccaataacagacaaacagagagccaaatcatgagtgaactcccattcgcaattgcttcaaagagaataaaatacctaggaatccaacttacaagggatgtgaaggacctcttcaaggagaactacaaaccactgctcaatgaaataaaagaggatacaaacaaatggaagaacattccatgctcatgggtaggaagtgtcaatatcgtgaaaatggccatactgcccaaggtaatttatagattcaatgccatccccatcaagctaccaatgcctttcttcagagaattggaaaaaactactttaaagttcatatggaaccataaaggagcctgcatcgccaagtcaatcctaagccaaaagaataaagctggagtcatcatgctacctgacttcaaagtatactacaaggctacagtaaccaaaacagcatggtactggtaccacagtcttaaattaaattatatggccacagcatcaatctacccagtgtcagctcatttaatgagagattttattaaagtacaaaattaagaaaagatttattgaaacagaataaagcaaatggggaaaactcttctagatatggaaatatatcttagaaaacagaaactaggattatttccaaagtactatgattaaaaatgtaacaacctatgcgtgttccttggaaataaataaaaaattaaatcacgaaattgtgtgactgcaaagaaacacatggaacaaatttagtcatttactgttcaatttttcagaactatatattgaagcacagagtttagttttggcacctaaaatcctatagcaacagtctaagtaaccatgctgagccccggagcaatcaaatcaaatctttaggtggatttggtcttcagaatttttggaaacttttttattcattctaatgtgtagctaattggagaatggctttggatggttccctactagtaatgactaaattgttccagagtatttttcatacgacattttctatcactcttctataaagattctcttctatgactgtgtcaacgtttcaatgggagggagtcagagtggcaatcaaactactggtgagattctctcctattttgattttttcctctaatggaaaatgggtgatggaagaaaatatagctgagagctatcgcacaaattttaatttagacaaaaagaatgttcaatatagatgtttgaggctgaactctgcttggctttcttcaattcatttttttctaaccccatttgttaacatgtcaattaacttgcatatggctcttaatcattttaggggacagtgacaactatgtttaaatagctacttaaatgtcttgcaatttttaaaattacaaagatactttcacatacatgatttttttccttttctactaattttagttttgaatctttgatatgtaagaacaacccaacatgggcacctgttgaaagtcaccatgtccttatgtgttgatgcacattttgtaggggaaaacatggccctgttgcttaaattactgcaagcaagagcggagttgcttagcagtggctccagtagctttactgttctatttgttttttcccaaagaattctgatctcatttttttgtaacctcgtgtcccacatagtagatttatgagcaggaatagaggaaggaaacaaattaccttcaaagaagagtgcctcataattaaatattgaaaaatactgccgtggtttgctcaccaagctaggacgtcaggtgttccagagtccactacagaccagacttcctccttctctttttccctcccattaacaatgtgagtacaatttagaaaagaggggatttttaaagcaaagaaagctattaatttaaactaattacgttaaatgcactttaagaagaattcgtaattgcaatcttcccgtgtttatcaaagaagctaaatcttataactcacattaaatataatcggtcatctttaaatgttaacattccaagctatcaaaatcaatggcttaaaaataaagatataactgcagattttggtctatcagattgagcttttgatttcattaaggaataaaacagactcttatagtgtaaataggcatatttgattgccaaacgacttggaacagtgtaactttacagtctgctttattgatttatgagttagacagcagaaacctgcaaaggggaatttatgtggtaattggataatttagtcaaagaagaaaaaaatggagaactaacccagagatttgggttcaaatattaaaacctatctagccatagatgtagactttttattttctttttacacagcccagtagatggtaaacctagtgcatttaattttgaatctgttctaacattgaaaggccacccctatgtgttgctatacagaacttattactctccatttaagaataacttgttagtttcatatgtttaatagtgtgggaaacagtcataaacacaagttgtaggaaatgtaaaatactagaaacttgccacacgtcactgactgtacttggacaacctgtacattattatgtcctcactggctatatgataaagatatagatttctttcatattattttgatgtgtacattttaagactgcaattaaactatagtatgcttttgtaaaaatctatctacaaattctacatataaggatgaaattattaaaattaatggcaaaaactgcaattacttttgcaccagtctaataacttcacgctacagccacagtgaacactattgcaacactctgaatattttgaagtgatccaaatttatcctattatttcccaattttgtcttatgcaaatgaatatttacttcaaagatagcacacagaaaatttatcgatctaaaatgcacagccagataacacttagcataacatactatgttttatttttctttcagcgtttatcgtgattgttaaatcttttatttgctttttaaaaattttccccgtctattcccattctctaaccactaaagttcagctgtaagaccgtgggccacccagcagatttctaacaaatagctggcaaatttattgaattccactgaggtttagtcactaagtatgtgtcagacaaatgtgataggcagtgtaaaatttaaaatgtgaataagcctaacgtggtccttgccatcttgccactcattagatagcaccaaagaaagataaaatttagaaattgctggccacttacgtttaccataatagtgaagaaccatttttccaatggaacttaatagtatcataaagacttcttgtcataatgccttatgattgcccaactttgaagctctgaaaacctttccaaaatactttgaatagtataaaatggaactcttcacatgaaaaggaaagactgatggaaaatatatattttagcctctttatgtattacctagtttttaaggattataccatgtgaatatctaatattttgaaagcattcacgttatttggtaattacagcagcctaatgaagtataaaagttgtgtttaaaagggaatatttgaaaacactagatgaatggttgaggcatgggttgagaacaggatgtgaatgaaaatggacacacaggtttaggggttaataaaaaatgtcctaaagttggattgtggtgatatatacatgactctataaatttcctattgttcattgactatatgtttaaaatgaaaattttatggtatgtaaattgtacctcaaagttgtttttaaaaccctattgaatagagaatatatcaattactattatatatttaaaaagataatttaaggttaccatcaactttttcactccattattttgatgcatagcaaagggtgaaatgtgatgaatgttgttaaataacctggaattaacttaaatggtagatatttattgatggcctactgatgtccgcaagatcttacatagtaatatcataatgttcccattgtttacattctattccatttaatgaattttaatgctaaagcatttttactgaagctgatattttaactcagatctgctttctccactttaataattagccctttattaagtgaaaattaacctagaagtacaatctcccaattatttctaggcagcattccaaaatgttccctagagtttgatttactcatttatctattttgaaaagtaaccataattacttgaaaatacgttatttctattttcaatgtttgtaggcacgtagtagatgtataaacgttacatgagatattttgatacaggcatgcaatgcgtagcaatcaaatcagggtaaatggggtgtctatcaccttaagcatctatcctttgtgatataaaaaattcagttgtactcttttagtttattttaaaatgtagactcaaattacttttttattatggtcatcctgttctagcaaatactaggtcttgctcattatttctaatttttgtacccattaaccatccccacttcctccccaacccctgactacccttcccagcctctagtaaggatccttctactctctatctccatagttcaattatcttaatttttagctcccacaaataactgagaacatgggatgtttgtctttctgtgactggcttatttcacttaacgtaataacgtacaattccatccatgttattgcaaatgacaggacgtcattctttttatggctgaatagtactgtattgtgtataggtaccatattttcttttttttattattatactttaagttttagggtacatgtgcacattgtgcaggttagtcacatatgtatacatgtgccatgctggtgcgctgcacccactaactcgtcatctagcattaggtatatctcccaatgctatccctcccccctccccccaccccacaacagtccccggtgtgtgatgttccccttcctgtgtccatgtgctctcattgttcaattcccacctatgagtgagaacatgcagtgtttggttttttgtccttgagatagtttgctgagaatggtggtttccagcttcatccatgtccctacaaaggacatgaactcatccttttttatggctgcatagtattccaaggtgtatatgtgccacattttctaaatccattgtatcattgtgagacatttgggttggttccaagtctttgctattgtgaatagtgccgcaataaacatacgtgtgcatgtgtctttatagcagcatgatttatagtcctttgggtatatacccagtaatgggatggctgggtcaaatggtatttctagttctagatccctgaggaatcgccacactgacttccacaatggttgaaccagtttacagtcccaccaacagtgtaaaagtgttcctatttctccacatcctctccagcacctgttgtttcctgacttttgaatgattgccattctaactggtgtgagatggtatctcattgtggttttgatttgcatttctctgatggccagtgatgatgagcattttttcatgtgttttttggctgcagaggtacaaggaggaactgataccattccttctgaaactattccaatccatagaaaaagagggaatcctccctaactcattttatgaggccagcatcattctgataccaaagccgggcagagacacaaccaaaaaagagaattttagaccattatccttgatgaacattgatgaaaaaatcctcaataaaatacttgcaaaacgaatccagcagcacatcaaaaagcttatccaccatgatcaagtgggcttcatccttgggatgcaaggctggttcaatatatgcaaatcaataaatgtaatccagcatctaaacagagccaaagacaaaaaccacatgattatctcaatagatgcagaaaaagcctttgacaaaattcaacaacgcttcatgctaaaaattctcaataaattaggtattgatgggacgtatttcaaaataataagagctatctatgacaaacccacagccaatatcatactgaatgggcaaaaaccggaagcattccctttgaaaactggcacaagacagggatgccctctctcaccactcctattcaacatagtgttggaagttctggccagggcaattaggcaggagaaggaaataaagggtgttcaatcaggaaaagaggaagtcaaattgtccctgtttgcagatgacatgattgtatatctagaaaaccatattttctttatccattcgttttttaatggacatttaggttgcttccaaatcttgacttttgtgaacagtgccgcaataaaacacgggagtacagatatttcttcagtgtactgattttctttcttttgggtatatacacagcagtgggattgctggattgtatggtagctctgtttacagttttttgaggaatctcaaaacttgttttccatagtggttgtactagtttacattcctaccagcagtgtatgagggttcccttttctccatatcctcgccaacatttgttattgcttgttttataaataaaaccatttgagttgaagtgagattatatctcactgtggttttgatttactattctgttatgatcagtgatattgagacccttttcatatacccgtttgtcatttatcttctttcaaaaaaaagtctattcagatattttgcccatttttaatcagattattagttttttcctatagagttgtttgagctctttatatattctagttattgatcccttgtcagatgggtagtttggaaatattttctcccattccatgggttgtctcttcactttgtgggttgtatgctttgttgtgaagaagatttttaacttggtgtgttaccatttgtccatttttgctttggttgcctgtgcttgtgtggtatggttcaagaatttcttgcctagaccaatgttctggaggtttctcccaaagttttcttgtggtagtttcataatttgaggtcttagatttaagtatttaatccattttgatttgatttctgtatacggttcaagatagaggtctggttttattctgcatttggatatccaattttcccagcaccatttattgaaggactcctttccccaaagtgtgttcttggcactttgtcaaaaattaggtccctgtagatgtatggatttatctctgtgttctctattctgttctattgggctgtgtgtttgcgcttaagccagtaccatgctgtttcggttactatagctgtgtagtataatttaaagttaggtaaagtgattcctccagtttcattcttttttgcttaggatatatttggctattctgggtctgctgcagttccatataaattttaagattgttttttctatttctgtgaagaatgtctttgttagaaaatacattattataatgaactcttctattatcgttgtcgttattatgactaagcgtaacatcgtttctcaggtatattacaagtaataattatacacaatgtccaattttttatttttaaacggttctgtggtcaagattacgcagaaaaatttatatgctttacttctctgctggagatttttgacccacttttttgtattttcaaaaataaaagtttaacctaaatttgataagaagccacagacactttttcctccagaaatatgttgatataccacaaaactcatatgtcaaggaacaatgtaggggagacactgaaatagactgtttcctttggcctattgcatatttctgataaaagtcaaaacttctttagctgacaaaatttaatttaaaggtaatatttttctaagtaactctacttgggggggggggtttaaaaaaagagtagtacaaagctgtgtgaatttcttctttttttacttgttgaattattataaagtataacctgaaacttttcaacattttttttctatgaaaataattatatttcttgcattttcctatctttggaaagtacatatcatcccaaatcttttgatatattttgtttctttcgttttctaagtacgtgtgatatgtggccatttccctttcttgaaaatagcaatttcaaaattactggctctttcaaaattactaatctaacagtggtacgttcctccatcaatcagtagtctcaacatgaagtattttaatatcttttactaaaatattttcttattttctctaaatttttcctttctttgacaccacagaaactccaataattatttgatatcattttcttcattctgttaagtactttagcctgctgcagtataattttgctggccattttctgttactatatatatgagaatggtttgatgaggtaaagcaagattttaaaaacagccctgctctctgctcagttaactgtaaagtcctatatttaaaatgtgattaatgtttgaatgattttttggttctataattttgccctttaccatattcaatggaaaaatggttaattcgatttcacttgttttattttcctactttgaatatatagtgctgtgaacatagttactgcatgctcaaatgccttttttataatggaatgttgagataagctcaaatgtcttttttaatataatggaaagatgatataatttgctttatattacttgactttgatgaagaaaatctagtgattctgaaaggtactggattgagaacacctcatagagcatatgtgagtgttcacatcagtatccgtgatttgctatgtcctctcactttgtttccattagagtttactgattttatacgaagccaggctgataatttcacaagaatagttgtatgtggttggcttatttgttttcttcaaatgcttactatccatatccccctagatgtatatattaggtgaaaatataactcaaattatacatccctcacatctttaggacaacttagaaatctagtagacaagtagagagatcattttccttcagattgaatcttctatccccaatgttttcttccacaattttattttctttcatcatattctcataatgtcaaaaaagaaaatgattacattgtctttttttatgagtgatttttacataggagattgttcttcccagaagtttcaataatattctgttatttgtacaagttacttttctatttcacaataagcctgcgctaaagtgctaagcattttttacttatgtggttccagaatacagttctgacgaggttaggtaaagtagctggtaaaagatatcctaagtacaagctaaaagttaattacaatttaaatgtaaattttgtggaattaatgtgtaaagatgctggcaaatatgtgtcatgcatgttttacagcttacccatagtagaatcaattggaaatataaagacattttattttataattttagtaatgaattgaattattattaatgaatatgttaagtatatttgatagcctttttccaaatctacttgtatgatgcactctggcaaaaaaaagcaaaaggataacatctacaaagtgttgtatgattcttggatatacacaatatatattaataaatattctgagaagttctgtggtatagacacatgttcatcttcaatttccaaaatatgtttaaccactgagttctttttaatgcataatctactcaatgcataaagaaaattttatctctaatcatattggaacagtactacaaatatgcgaatttcactagaaatgcctatacattatgataaaagtctcacttttatatgatgttcaatgatgatttttttcaatgttaataattttagtggtggcgacctttctaaaaacacagaagctcatcctcaacagtttttctaactatttaatggaaatatgtatatttcaaattccatggaatgctttgccttgagctccaaattgcccaacattcctctcacaggttacttggtccttcatgtcccctgccaacagataaaagtcgagtgtttggttatatgtaagctgttgttgttcctattatttatgacttatgacaacaatatgactcatttgggaaaatgtggaacttatcaggaaggcctgtgttgcagtgatcacttacgctatctttgctttgctttgtaatgctgagcttctagaatttccaggggcagtctttgaaaaaaaaaattataaatagaaaattaaatgctggtttatagaagggtctcttgcaagtgagaggcactgaaacttaaggttctgtagcttcatactaattcctcatctagatagtaattcttactaactcacattcagtctttcctcccattaaattaagcacacacactctgcatgccccaagcctaatctttgctagcttgtttcctacagcctaaaataagatcctatattcttattctctgaccctccaaaaccctttctcagccatatgctagttaaatcatgtaaatttcctaaaaatcaccagattatacagcagatattaatatttatctttctgatcacagagcatgggtttttctgtttttaaaatttttttaaattatactttaagttctagggtacgtgtgcacaacatgcaggtttgttacgtatgtatccatgtgacatgttggtgtgctgcacccattaacttgtcagttacattaggtatatctcctaatgctatccctcccccctccccccaccccacgacaggccctggtgtgtgatgttagtttttctattacattgcatatatttctgctttgtaatttacttatatatctacagtctgcctcttaaaataaggcttctgtaagtataggggcaacaattttgttctcactgtgtggaattgagtagtagaagctgaacgatttgttgaattaaattgactaaatgctatcaacatacgaataagattaaatttctttttttctcacaaatgtccatttggaggatacttttattttaaaatcataattaaagaggcagtataattgttagagggcagcaagtttgttacttcctagttatgttaccttgggcatgttgatgtttctaccttcatttgtacatgaagatgataaatacttatgttaatatgattaggagatggaattaattatataaagtgttagcacataagttcccacaaatatctgtggtggtgaggatactgatgatgatttcttttctttttttttttttttttgtttttttgttttttgctcttctttgaccactctggtataaaaggttaaaggactatgtgtatacttcattttttcctctactaaccttggaggctaaggggatggaaaaacttttaaatacatgtacacagatatgattacagatgtataatttgggccctctaccctctctgagtgtattcttatttttttaaatcagtttcctttcacagtctccacaattgctattgaacttttatcactttgatttaaattccaccttgattctctcctctcatcctcagcagatacctagggttttgtgcttacgaggaaatgacatgttatatcgctgataacttataactaaatatttgtgcaaataacatggacaggtatttttacatatactgtcacatctgatctttttgaccaaaaccaatgtagttgactactgaagaaatgagaatttctcagataagaaaacttcattgctggcttgctattatcattcttgggctagacatgagaaaatcaaggttcagaacatgttgatgctttgcccaaggtggcaagagagagccctgaaatttaaatcctggttactgttaacatgatttcaccctgatactctgagagcaccatgtaggaagcattcaacttcttgcgtcttcacatcttacttttgttttctgaaaaagagccacctctcctcctgttgatattttccgttggccctgagctttgtgcttcactctggttttcttgctttaaacaggtttttttaaaatcaagtttatcttcttacatttaaaaaaaatcactttatgtgttggcttctttcatgtagccttaaagtatgttcaagtctgattgacctgaattttattatgtgtggagacaaaagtctgcaaaagtaatttaaactatttttattagagtgctccttgatccttaatcaggccagcccttgaaaatacgatttctgctctcgtcatccacttctctcttctagctgcaatggtcattgacgagctcatgtaccctgattactattgatcccattgaacctatctcaaactgtcactgttgacctctctctctcattcttaaaattctcacatcaattgatgtgagattttctctcttttctagttcttcttttctttctctttgactgttctttctctttatttggtgcttttctttccatgtcagttaaatttgtgttctccatggttctctctttgttctctctttctgctttcctctaacgcttgaaaacactgaaaaaatacatattatacaaatgtaccctgtttccctctttctctctgtacagacacacatagtgattattaaaatgcaaactcacttcaacatactgctgatttacagtcgcatttcctccctatgaatttccttagttatcggatcaaatattagcaataaaactactgttatctgtgattatgatcaatttcaaattttgaaatttatcttcgtgatcaaaatagtggtaaccattcatttgggacataaagttatttaatacctgatttctacctacatttcttgttaaattttgccaaactccttatgctcttcagtgccctgtctccacaccttgtctctcttcaaccagaaatgcttttgtttttacaactcctatatccttgcgtatccagtatgcatatacagtatttaggactctcatttagaagtaacaaaattgaagtaactaaagcaaaacaaatgagagagaaaggtttttcatatggaaacaggaatgtgtcatagaatccaagggcagtaataaagttttgactcaagaagggactaatgcctgtgttttggttatttatgatagccatttattattcccactaatggttttgcgtgttgagaaagctcacctggatggttctcttttgtggtttcttatgtgattttagtccattgttgtctgatactatagtaacctgaatgctcaactgggctgaacgtccaagatcactcattcacatgcctagcagttgttggctgaaagccttgttgtgattgttgctgaagcacttatccatggcctttcgatgttacttagctttctcagagcataatatgttggatggattctaaaagggagcaccctaagaatgactgttctaaaaagatagacgtggaagctgccaggccacttaaggacttttgccataactggcacttggactatattctattggtcaaagcagtcaaagagtcaacccagatttaaagagctgaagaaataaacttcacctcttgttgagggagtggtaagaggagcatgtgctgtgggagctattattgcagccctctttcgaaaatgctatctacgggctgggcacggtggctcacacctgtaatcccagcactttgggaagccgaggcaggtggatcacctgaggtcaggcattcgagaccatcctgaccaacatggtaaaaccctgtcgctactaaaaaatataaaaattagctgagcatggtggtgggcacctgtaatcgcagctacttggttggctgaggcaggagaatcgcttgaacctgggaggcggaggttgcagtgagccaagatcgtgctattgcgttccagcctgggtgacagagcgagattccatctcaaaacataaataactaactaaataaataaataaagccataccgcattggaagccatcagtgtttttgttaccacctcactccctatgcatctacttctttcttctctctctgttcatggacctttgctcttcctcaatccactctgcaaactagggacttcgtaagcacaatttgctagtatatgtgacacaattcgaagcactcacagtttgaccagactcttctgtcaattctaattttctgagagagattctgatgattctctcttaacacaagcattgtgtgtattctgatcacccataacatggagttggccagaattacgtggcacagacatggttgttactggcccacctttttgaggaggattaacatttccaagatgaaaggccctagccataacccctctaaagcatctgttactcccagcaatgcttactaattattgaaagttctactttaacatcaactcccttatgacatcctccgtacaagcatcactccaccctgcatacttccatccaattttatagattctgtgatgtttcttgctctataaataacgtcatgcacctagatggatccctactcccagattctaggttcacgaaacatatcaatatttctcacacaaggtagttattcaaccaatgaagatcatcgatatggtaataaaataagatacatttatatgcgtatttgctctcatttgttttaaggcagaattctaactatttaggtaattcataattgatttgcctctataattgttaggattaatattctaaggaataatattgaggtacatctgtgaatttataaccttgcataaggagctccttaaccacttagtccatgttcttggtataattctcattactcagttcagggctatagttcgctctggaaactgctaagcaaaactgatgttatcttctaatgatatgtatcagaatttactccaattggtgtaaattcacttacactaatatacgttatgcaaaatgatctgcatgataatgttatgggcactctggtataatttagtttctgctctaaattataataatctaataatgactgaattttaaattagaatgatttgaccgctagctgattttgtatggatttgacagaaataaataaataaatgtattgtgttcgtgtccacatgctgcagagatccctgcctataactggctcagaaattcatatgttaaatgcagaatatactttactatagaacttgatcgaaaatgtctttattgaatatataaatattgaaatgttttatagttatctaaaattcacaatcagtatctgccggaagccatcaaatatctatcagacaaatagcaatacctgtttggggcatttgacttccatttcttagattcatagcttccctgaaatttaactgaaatatggcacataatgactgagtagactacactaaggccaggcacagtggctcacgcctataatcacagctctgtgggaggctgagacaggagaattgcttaagaccaggagtttgggaccaggctgggtcacatagcaagactctgcctctacaaaataaaataaaataaaataaaaagaaggtaattaaggagtattttccacatgcaattttctcattatatctcatccctgtcacagttggctgaatcttacagattaacatcatgtctttggtccgatttgagtgtgacttcaaagataaaacatatcaattctacatataatatataaattacctattgaaaatgatatctgaaatagttgatattgactcaaaatgattattgcttttttcataataatcccatagggaagaaataaatcgtttcacttggataatttatgaaagtaaaaaatatttatgataattctatttaggtgatccacctgcctcgacctcccaaagtgctaggattacaggtgtgaaccaccactcttggccaatttacggtcattttaaaggaagctacatggtagaggtggttgaggagagtttctgaatttcgtcttcttggaaagttagttgttctttgtagagcatgctgactaataatgctatcctcccaacagaaaatccaatctgatttgacaagtcatgagatcagtttagaagaaatgaagaaacataatcaggggaaggaggctgcccaaagagtcctgtctcagattgatgttgcacaggtatatgttatttcagaaactaaggaacgtgttttcgttgggcattatactccagtctatattggacaacttgattattggcaagattggatttgaggacattatttgaaaactataatttgatgtctaaacaatgagtgttttgctctctacattttaaagataaaataggttaataaattaccttttatttagtataacattaagaaaaaactactgaatcattctcccaaatgtatgttttcctgtgttggatgaatggaaaaatactgctttattttgtttttatttttctgtatatcttcagaaataaaggcagatctatcaataaaaataggaccagttattgtttgaaaggcaaaattaaatcagtgcctttttacactgtccttacagaaaaaattacaagatgtctccatgaagtttcgattattccagaaaccagccaattttgagcagcgtctacaagaaagtaagatgattttagatgaagtgaagatgcacttgcctgcattggaaacaaagagtgtggaacaggaagtagtacagtcacagctaaatcattgtgtggtatgtatttctggtggcaaatacgcaggtaccccttgactttcctcattaagaagtaactgctcttttataagagagaattgttttcagataaccataataattatactatgtaattttaagattgagaacaaaaattggcacatgtattgtggcctattctgtgtgtcttttttgagtctataattctgctaagaactgtgcagaatataaaaggatgttgcttgtgtttaatttttatgattctttaaatatattttaaatggaaatctagaaaggaaatatattaatctaaaaatagtaacaacaacagtagttgcaataatcctaacaacttcagaaataatggatgccaggtaaactacgtgacatacagaagtcacctttaattcttaaggctacagattacctgagagaatttaaggacaaacagctggtgaatggcaaagcaagattccaattcaggtactcttattccaaactttaataactttcctttaaacaccagtactggatatacagtgaaatgcctcaagacaacaccgaattaaaaggcatggaaaggtacaaatagcctaaagtataaatctgatttaaactttataatattgaacggtgtcctatgttgctgttattggaaactcaccaactgagatgattcctctgaaaacaaagctgaggtatgattgcatctactcgagtaacataagtattattataactctacatgtactatcggccattagagtgggaagtcacataaaatgaaaacacagaatgttattaaagggaaaacaagtctatttagtacttgatattttaagtattgtttctacatctactccataatatcaatgaaaaacagagtccttcagatacatcgtagtcatatcatgaatggggaaatatttttctttttaacaaatatcttaaaataaatacatatatttatgtgtgaaaaatatgaggtattcttattcgataatatattttcataattcaagctgcattttagtggtataattactttaattattctcacccccaaaaagaaacttggaatagaaatgatagaaagtagttagttgatattagatgagtaaggataggaatatatgggaacatatcccatcttaaattttgccaaaaaaaaaaaaaaggaaagcataaatgacccaagtgccttattcatgactaatatttgcaaagtgagcacttttcgttcttttctagaaacaggtctctaatgttaccttataaaatgtatccaacagtaaatatgagctgaaaacaatctcacctgtgtcaagctgtgactgtgccctgcgtcagtacaaaggaaactgctcaaggcatttgctcaattggtttctggttctggtttaaatgtcaggaccaattgaagcagttctttcataagaatatccttacactgtttagttttttcattgtttacgatgctttgtggtgtataccataatcatagtcttgccttcaagacatgtttgtctatttataaaagtcttactttcatgaacacaaatataaataatatttctcccctttgtttataaatattttacttgcctattgaatgaaacaatgttaatggctaacggtaccttgagggaactttcttcatcaaaataaagcatttatattttttgaagttcagagagtaaataatttagaaaaatctctgattccaaattagcatcgttgatttccaacataataattaatttcagtgtttccagatacacagatatttttatatcttctaagaaaaaagtaaaatgaagtaaataatatcatctgggaaactcagacaaaagtcataattattagtgatgaaggaatgttaacatcatttgtcaaagaggattaatatggaaatatacatgtagcattgatcagataattgtccagcctttacaaaatgcttttttttagacattacttttaaactgaaaagagaaattaaacccaatttttgttctaattccataaaaacaattacctactgtcaggtttattttttggtaatactaaaataagtactgatagttcagatttatgactaaacaaattaaagcagagatacataatgtaaactattatatatacgtgtatacgtatatacacacacgtacatatatttgaatacatggccacatacatacaaagacatatatttctaggaaaactacaaagcaaaattaagacatcaagtggtgttggagtggtgttggtggtataattgtgaacatagctgtcttccaaagttatgacacttgtcttatgatgcttttttatagcaacctatgttttgtgaaaccgtatgtgtgtgctttatatttgtgatgtacatgtgaattgtcaataatatttttatatctggttttcatcagcacttttaagaaaataaagttgtgtaatttaattaacattgaaaaggaccttactttcttatatatgatacaatatatattgaaattatgatgtagaaatttaggtgctttaatgttactaatatgtaagtaccatgagaacaatagtgaatgtgtgtgttttggccaccactgacttcccagtgattcaaatactatctgattgatagtaaccactcaataaatacccgatgtaggagtgaattaattcatccaaatttatggctagaattatataactccaacatttaaaatagaagtcatgtaaaattcagaattgacatttatgttctttgattgaagaactaaatatatatatatcacaaaacacatatatatgattaactctctgtttaataagaatagctgcaaatgacacatatatgcatgtgtgtagacaattagaaatattaaatcaacagaaaatgcaaaagctagatattgaccaccgctgcaaaatgctactctattaaaatttcaaacatggaatagcaattaaggggatctctatttatttctgttcataatattatgaaataatttaactctactgattatcatgttttgttttatgtttaaacttagaacttgtataaaagtctgagtgaagtgaagtctgaagtggaaatggtgataaagactggacgtcagattgtacagaaaaagcagacggaaaatcccaaagaacttgatgaaagagtaacagctttgaaattgcattataatgagctgggagcaaaggtgtgtgcatgctgagaccacaaacacttctttccactttccttataaattgtaaagcaacgggcaataaattatgtatgattagagtcttagcaattctaaacacctctctctctctatgtatatgtatacgtatatatatacacacatatacgtatatatatatatgtacacatatacacaaagataaacatatacacatatttcgatgtggaattctcattaagaaacaataattaatcagtgaggctctgcttattcagattgaaaaatacgtaacgctcagggaggtttttcctggtccatcagatagctctaaaagggtttcttagttgtaagtgttccttattttcattatatatatctacttgtgatgacttgaagactggtaaatattataaactgtatctatttatatgtaggtctaatgttgttaacatattccacagagaccacattaagtttaaaaattacacagtaattatttccctatatggccaagacttgcaaaatctaccacacttggctaataagatagcatggatagccagttaagacctacgtctctgtaattatttttgtatcattgtcctgatcagagtctcatgaccagctccacttcactgctaattcaagatgcctatatctctccatctcacttcgctcaactcaaatattctgtatagattatgatagtaagtagtctcttcactctgttgattgtttgttttgctgagcagaagctttttaggttgatgcgataacagtcgtctagttttcctcttgttgcctgtgctttgggagtcagatccaaaaaaaatgtttgcccagaacaatgtcaggaagctttttcctgttttcttcaaatcattttataggttcaggttttaagtcttgagtccattttgaactggttttttatatgctgtgagataagtgtccaattgcattttcatgcatttggatatccaatttctcagaaccatttattgaagagaatgtccttttttcattgtgtattctcggccccttggttgatcagttgatcataaatatgtggatttattattgggctctctattctgttcctttggtctatatgtctgtttttatactaccatcctgctcttttaattactagagcattatagaatatttttgaatcaggtaattatgatacctccagcttcgttcttttggcttaagattgctttggctattctgggtcttttgttgttcaaaatgaaatttgggattctttcttctacatctgccaaaaatgtcactggaattttaatagggattgcattaagtctgtaaattgctttgagtggtacagacatcttaacaatattatttattccaatccatgaatatgggatatctttccataaacggatatcttagtatttccaaaaatggacttctaacattttaatttcgttctgactgaaagaactgaatttcttggaggataaaaagttatatttttacaactcaggttctcaactttagtgaatagaacaacatcactgataaaattgtcacctcatcttagacagaaatatgaatgtccatgtttgagaaatagctaaggagaggcatatttcttgcatctcagcctgaaagtagattgaaggttatatcttcaagatattagttgccaattccttaccatagaaagtaaattttataattaagttgaaatctggaagtaatcatttttcttagatagtcttgtttttatattttaaaaaccctctaattaatatttgttatgttttaaacaagtttgttgccatcctatgacaaaagattctcctactttgtttcaaaataagaaacactgatactcaattgatgggaaagcattatgataatcttgaaataaaatacatttcaactgttcatttggtctaccaaggtacctttggaatgagatacctttatatcctctagagaaatttatcattgtttaaagatcaccacagacagaaaaattgtatctgcacttgataccttattccggtgcttatcaatttttatagatgccaattatttcatatttaacatcaattacgaaggactgagtaatctctagtctcaaatgtattagagattgaataatctctaatattaatcctaatgctacagcttcagttctggagatatattgtttttgtaattataaattttaaattaataaaatgaatgtatgttatagttataaattacaaattttcagtttataatttgacctgtgtgactttatactaaaataatgtatggatgagtattttttaaattaagaaaatatatgttttggtaaaggggagtttctcagtttactttttaaaatagaggttttttgtgtgtgggctttttatttgtcataggaatttttacgaaatcattgcaagagtaaatttaacataaaataacagaataaatcaattagaatttaaagcaatgaaagtgacattagacgaataatagtgccctgagttgattattattcagaaatgaatgattctcgtaatgatgtcaaaccctatttattcctgaaaatacatatctgagagcttgtgtttattctaaccatttgccacatagtaatatccttaaagcaaaataaaagtgtatgaagaaatcatatttaactttaatagtatcacagaatacagcaaaaacataggccaaacatttatttttgaagtaaatattgatgtagaaacatttgtgactaagggatcatgtataaataccatcttataaaaatgctgtaagtcctatattctttgcctgagaataaaaatattgtctggattttgactcaaaatattttcaacagcagtagctttgtctaatgaaagcaaaggcaacaaaggaaatgttattacattattctttttatgtaagaaggaacccttctattttaaccatcttcagaatttatatggttgtgtctgccacaattgagtatgcattacctttttggagtaatcagctctggctgccataacacaataaaataaactaggtaaattgatttctgcaagtgtggagtctgggagtgcaagatcaaggtgctgatccatttcattcctgaggagagctttcttcttgtcttacctttttgctgtattcttacatggtgatgagtggggagagaaaatataattaatttattaagagatattaaagctggcaccattgatgtaataatacctataacccctttttatttctctatgctctgatttttatggaaatttacataaatagcaatactaatatcatcccttaaatacattgttaacttcgtgaaacaatgactactaaaacattttactgcaggtggcattgtgttaaacgtatccattcctcgcatacacacacaaagtataaaactcaattttccttaagatggcagtgtctcctgttttttaaaaatgtatttagctggaaataaacaaaatgaaataaataaaaatcaatactgcattagctctgggaagatagaatttctttgaaatattgaatctggaatcatttttctaccaataatgcataggaaaaatatgcatagaaacacaccataaagtatattttccctcaccccccacacacccctacaacacaaaattcttgcagtcaaaagggcagatgcttttacttaggaaaaaaaaaaatagaagggaaaatctgtttaaaaaatgaatttacagcctcagcaactaaatgttttctaaatgtacgcacacctctcctaaagaaaataaggaattttattatttggaattggaattgttatcaaggttccagaatatttatttcgattgtagcattttagatgctttatacatatttttatcttttgtgtttttcttgcttatagatagattcttattttggttgtacacacacatacacatagacacacacacacatatatatgacataaatatatgtatcagtcagtggtgcctattgggcttagggcataatgcacaaataacgcacttgtggtggtggtattgttttaaccaattccattacaattgaaattaatctggagtctacctttcagatttcttagcaacaaaagccaaatcttgtccatgttttatttacctgtaaggtagtaaaataaatgtaaataaagcttttgctctatacattcaggcacagttttttattgaaccatccctaaaggtaaataatgagaataaaggaagggattgaggtggtacaatatgtcatgctctctcaaactgttgtctgcctttaccctcgcaatattcctgtgttctattaataagtatagtaatcccatttgacagatgtgttgagaaaaatgaggtgttctgccaaaaatcatactcaagtcgagagtccactacgtatcgcagagcctaacatacttacattccatcatgctgtttctgcagagccaaatatttatatctattgttcagattcccaggcttcatgacagacaagggttttttttaaaaaaaggtgaaaacacataccaaagaaaagaaaaccaggagcaacttgtaagagtataaactctttatgtaaattctaccagttatattttctaacttgtaattaacgatttgcaagtcttcattcattcctttattcaatacataaagcatatttagtgagacctttctttgttcaaggaactttcaggagtagagaggagtaatctaaagatgtgtgaggcaagaagatttgcctttaagaaattgtaatttatctggcttttgttgatgatttgactgcctttagtagaaagagatgctgggatttttattaaaccaaccaactgaaaatcttaacaaaatataggcacatctgagaaggtggtggagaaatacagatttgttcatttcttatgtgagaatatggataatttgcttttgagggtgttggtatcaaacactgagaacaggagcacaggatcaagtaattagtttttctattaatgggaatgaatattgtcttcacattcatctttttgtccctattggatggcaaaattatgtttaaggaggaagtgacctattcactgtattgtttttgagcagatgtgagacactttaaagatgtaacgaggatacagttgagaattctaggtattacacaaatacttttaccttttgagagaattaatcttctatcttcattttgattccttaccagcatgagctagtctcacttgtatatagaggattgtaaaccttcttgccatattattgacacatgacagtaagttttcagtgagaaatgagttttatcttcagtttgacttatatcattgtatttatcataaactttggctataaattatcttagagaaaaattcgtataggtttcttttctaccatgacgacatacaagaccctatcttttggacaaacgatgtcatctgccctagacagtttttattcactcttaatattcagaatatatgatttttataaaatattattttaaaacgtgtaagaaaatagttattttaaataacagaaatataaaagttccaaataagtggttataacgaaatttgaattaaagagtaaactaaattacatttcattataattcttttcaggtaacagaaagaaagcaacagttggagaaatgcttgaaattgtcccgtaagatgcgaaaggaaatgaatgtcttgacagaatggctggcagctacagatatggaattgacaaagagatcagcagttgaaggaatgcctagtaatttggattctgaagttgcctggggaaaggtaaaacctatatcactgaaggttattttgaacatacgtgaaaacacataatatgattttgtaaggaagtattaacatgtagcaataatagcattataaatattaatattgtttcatattccctttcttaaaaattaatctgtgcttttcaggaccatgataaaaccaatggtaagctttagcaggagtctctccaaaagcttccttagagttcagtaaattatgaataagaccttaagaaatacataggtcattagtctgaaaattggtccagagatgagatcctataatgtactggcttgcctaagaccatactgcccagatgaatcccacagccatgaagagggcaaggacacagagattgaagacagttgggctggacaggacttgcaagattagcatattgccaaagtcgcatttcagaaagaatctcaaggtgtctatgcaggggctatcatttccatcaccaaatgacacagcgactcctgtaatcattagccgttaaattcttgccctttctctgatggccaatcatttcatgctgcttagaacttagtcaagagactcatagcttagtatttttttttttactgtttattcattaccagattacctgaaagtgtgttgatataaagaaaatagctgatattgataacatgttttacctcaaaatttgccactgtgttaggccatttacacccacttaatgttttaaagttaccaaattaactagatgtataagacgtttatactttatttttaattcaatgtggctatccagattattcaaagttgggaaattttcaataccttatgtaaaaacttacaatcgtataaatgagacccaaactgaaaactgtctttatgtagattcagagaacaagtagtaatatattttgttacataaaatatttccaaataaatagtagggaattaaattgtttttcttctctttcagaataaatgtaatgttagataagatattgaattatagttattcaggatcatacatgagattactatagcaaggaagatacagtatatacaggttaaaactcacattagccttattttttcttatcattcaaacatattacttgaggtatttttgcattagcctcaccatgaaatcattcaaatgttataaggtaatgacctttgcagaggtttctaggttatccttctcatatagaaggcttgaatagtctggagaattgtctgcttgttgaatctgcctggaaagtatttttcataacgtcaaggagcaaagctactgtgagatctagtaggaaaaaaaaaaagcttagaaaactggcatttattttctttctttatagaataaagataatttatcactctatctagatcttttcaaacactaagctgttaatgacatactctaaaatctcttagttgtcaaataaagtatattcatttgcatctgaattacagaacttttttttttttttaccaatttatttggaaggttctcattatttctttaaaaataacaatcataaaagaatatatgccctgcagatctaagccagtcacatttatgataatcattctaatattttaacataaaattcaaactctcatatatgaaaccccgtgactattgagtacattctcatttctcatggtttcttggtaggtggagagcttaattcaagctataagtttcatctgctgtttcaaaagataaatgtcacatttttaaaaactaaattaaattcatttaaatgcaatacattaaatgtagttgccgatcattccaagtatttggaatgtgactgcagcaaatttgaatatctagagtcaatttcttttttattattttaaaaaatttttagacaatttaatttatatctgctgaatttctcccagttctgttgacccaagaacattatatttattttcgtatgaaagtatttgaacatctagtttcaaatattcaaatacataaaaatgtcaattactcatgaagtgattttttgacctttagtttatccaaacaaagcataatttcaagtacattgactatagttaaatagtatcagttttatcttaaagtatcttaattatatttaatatatattaaattccagaaaaattatttagtgtggcttgaagagatacatatggcacaacttgagaagcctaaataaattggaaaactaggaaaaggaaaattatagtagataaataataaaaaattcttgcatagaaatatatccacaatgtatcatgggtggtggaatggacagggaacattttaaagccacaaattggcgccaagcttcctaaaagacaaaaccaagaagtaaacatatttttgagacccaaagtttccaaattattaaaataataattaaaataattttaactttactagtagtatgttagctttttgctagaacttagtgccagaagaaaataaatgggagggtcataaaggtgataacacgctgattcatattcttataataaacaataagaatgtttatttttttctaccaacatggctccatgaaaaagaaaaatttagtgctaaagggccattcaggaaaagcaattctatgagaggaaaaaatattggagcagaagtctaaagtagtctagcaattgttttcagattttcagattctctattttattaatttttaattttgtatggatacatactgggtgtatatatttatgaattataggagacatttttatacaggcatgcaatacgtaattgtcacatcatgtaaccttctgtgaatatgctttcctgcaactgagcttttaagtagaattagacatcagagatttgaaggttatttattttctctgaatacagaaaaaaattttctgtatctttttcctggaaagaagccagattgtttctaactgagaacacatttctatacttggccctatatctaattggaaagcagggcttcatattcatgtgtatgtcatagtactagaaggcttcaatagctaaaaatttttgctaacatagagttttgggtttgaaccagtcacagagaaattggctattgagccttttcgtgccaagcataattgaagaaagaaaactcaccatcgacaactcaaaatatgttgacttctctaggaacctgtatcaatctctcagtgaatgtatttatttgaaaacacagttgggctattactttagctgtaaaagctattgaaaataaagctcagtagtactctcttacttgatgatggcatttaaaaggtgaagtgagaatgttttatagggggcatgaagtatcaagtactgagtgtgatgaaaattaatatactggttaatgataatactgagtctaaatgtactagtttttcctgtgatatgagaaaactagaattcacttttcaagatcaaaattagcaaagaatttggaagtattgctccaattggagaatcagaagtcaccttaaaaacaatacagattttactaatctatagtaatatatatttcataaagtcttcatgtgacacaaaagttttagggttttggtttttaactagccgtgttatataatcgaggaaatttcctatcctaaattagaaaagtataagcatatttaaagttcaattcagtttttcttacattacgaagctgagaaaaatgaatctaacattaaaatcaaaagcaatctggtctggcttactgtattcatgtcaccaatgcggtttatcaaaaatccctgtcatatcaaatcaagcccttccacaatgatctaacacttaagtttttatgagaaaaaaaaaaaattggattctctatactcatttcacctccttaccgtggctgtgggcaggccccagatgatgcattgtctataatataaactatgttggtgaccaccaaagcagccaggcattcttgctgttccttcatttcttactagattatgttatttaattaatttaatagtatttcatcgcctatttatagggccatagtccatgtgcaagcagttttccagtaccaccaaaattctcaataaggtcccatcacaactatcatttaggcctaccataaaatacacagaattaataaaatgagacaaccatcattgtgtgagcaatacttaagtcagccccatgcaccttcagagaggtactactagcattgagatgaattattccaacttgtagggaaaccaaatagataccgaaagaaagagtttattcttatttatttattttgagatggagtcttgctcttgtcaccgatcctggagtgcaatggcccgatctcggctcactgcaacctcctgggttcaagcagttctcctgccccagcctcccgggtagctgggattacagacacctgccaccataccctgctaattttttgtgttttcggtagagttggagtttcaccatgatggtcaggctggtctcgaactcctgacctcaggtcatccacctgcctcggcctcccaaagtgctgggattacaggtgtgagtcaccacacccggccagaagagtttcttacactggccaaaagatcagttatgttctttataaacttggcataggcttagggggcaattcaccatttgttttctaatgctgtgccctttaaaaaggaaggggaaggttgcctaaaacgatgaaagagatgttataaaaatcaagcttcttgagaaatatagtaaaattggaaacaccttaaatgttgcagtgtgttaccatttacacaaaggataaaatatgtagaaatatacattatttagttatatataatatatagtaaaagcagaaagatgtttgggaattaatataaactgaatacagaacaagagctatctctgtgaggaaagacaaaagaattgggtgggatatgaacaggacacttaaatgatacttgtaatatttcattccttaagatgagttatgcatacagaagtaatgattacatttggtatactttctgtgtgtctaaaatcacatataagaacataagaaaacatacaaaagcaaatgcttgggatttttccttttggaaactccactagccaggttctgtaagataacgcttagtaattaaggaacacccacttcgtgagtattattggtttcaaaagagcatggccactgttcattcggtttgcctaagcattggccaaagattctcctgctgattgagcaacaggacaggaacctagcagattaattccagcgagatgaataaggaacattgtctttccagtttttaaagaggatgtttctgtggctttttttttctttattatctacattgaagcatgatcgacagattcttatcaatgatttccttgtgaaagcagagtcaagggaatgaatagcgcaaaccgagaactgagaattttcatcaaagtggaaccaaaagttagcctgtgtatggtcagtttgtgtggcagcagtgctgttctatccttaagaacacttctattcagagagaatcgttattagagaggacagatctgtaagtcactgggtgaggtaacatcagaactgaaggtcctctgaaaatgatcttatttccctttttgtaaacaagaaaactgtgcaaaaagctccatatccctttctctgtttctcgattactttctttttaaaattactttagattcaggggttacatgtgcaagtttgttacatgggtgtattgtgtaacaattctaaaattcatatggaaccaagaaagggcctgaacagctaaagcaatcctaagccaaaagaacaaagttgagggcattacattgccccacttaaaatatactacaaagctgtagtaacgcaaacagcataatactattacagatatagacacctagatcaatggaacagaatagagaactcagaaataaagctgcacacctacaaccaactgatttttgacaaagttggcaaaaataagcaacagagaagggacaccttattcattaaatattgctaggatagctggctagccatatatagaggaatgaacctggacccctacctttcaccatatacaaaaattaactcaagatggattaaagtcttaaatgtaagccctgaaactactaaaaatcctagaataaaacctaggaaaagttcttctggacactggcttaggcaaagaatttatgaccaagacctcaatgacaaatgcaacaaaaacaaaaattgacaaatgagagttaattaaattaaagcttctgtacagaaaaagaaacaatcaacacagtaaacagataacctcctgaatgggagaaaatatttgcaaactttgcatctgacaaaagaataatatccagaatctataaggaacttaaacttgtcaacaagaaattaaaaaaaaacagattaaaaacaggacaaagaacgtgaatagacactcctcgaaagaagacatacaagcggccaatgagcatattaaaaaatcttcaatatcactaatcatcagagagatgccaattaaaccctaaataagataccatctcacaccagtctgaatggcttttgttaaaaagtcagaaaataacggatgttgattgctttcatagggtgaccatgattacatttgtaatagtcattcactcctaaggatttcaaagtcatgtgggtccaggatcctcaatatgaggattaatgttaccatgggaaccatgaaaagagctgacctaataggggccatatcaattctagccaacttcttgagcttcctaatagagaagaatgcctaagagactctctcaccaagaggaaggcaaattaactagtcagataaatgagagcagagatgggcaaactataattggtaggcctaatccattcagccaccttcttttgtacagcccatgggctgaaaattgtttttatgtaaatggttggaaaaaatcaaaagaagaactagatacttcaggacacataaaaattattaaaaatgcatatgtcagtgtctgtacataagactattgaagtgtatcaatttatatttgtttattttttctggctgcttttgtgctaaaacagcagagttgagtaattgtgacagagactgcatggctcacaaagcctagaacaactactatgtggccattcacagaacatattcaaactcctgaactagaggaaagctaatatagaagcagcaccctgtttgaccatagaattttgccatgtcttcttcttgaatgagtatcagaggtttgacatttctgggatccttttgataggccagtggcgttgtagaattggtctttcctaaatagaatgattcatctaagttttcttcctgctcagaattaaatagtaacatattccaaaccatagatactagaatgcatagcccttccaaaagatactgggtggtgcgtgacacaatttaagatgtttaaagataccatctacttgaagagaattacgaactcaagaatgtcttaggtattctaattcttaatgatcccacagagaaagaatgggagaacttccagaagtagtgaggatgtggtcaggggtgattaactgaagggacagctgcaggtaagaaaactgtcctgtgtccccttaccctgtgaccatgtttccaaattatagttacagaaaaaaagaatatattttaaaagtattccaaattgtttaaaaggtaaagaaaaatttttaaattaaaatgacaggaggaaagccatttgagaatattaacaaatgagataaaagattgatgatgaaaattgacaatttaaattattaatgctaattgcaacttcctacagcgacatagccctttcactgtatttttaaattcacccttcaatcagagtagtattaaagagggtaaaattaatgttaagtttttaaaaatatggatcaatcctagctagctgcatggtccagacaacagcaatgccacgaggcagccatcacagtgatatttatcaccccataaatgttcagatacttttccttttctgttaatggaattttctaggctgaggtgacaaacactgatagctgtagaatagagatgatggaaggaaatggcaaggcaatctacaggagattactagcacctgaagagtttgaatactggaactgcacaagttccttgagctttcatgataacccctactctcttggactgttatgtaggcaatagtaattcattcagcaaaaggacagggaaaatgtgtattttggtctctgatatttcccatgtacataagatattgcctgacacataggacatactcatgaaatatctgtttaaacgtaacttgcaaattaagagttgcaaattataatgacaaagcagttcttgagagaagagaaaaatgctgatttacatttaaaattgtacaagttttataacaaacataaataatcacctgatcaaatgttcccgttttatagatgaacaaatacaagtcctggtacatagcaaaactgtaatactatgcctgatttcaacagttttttccactataccaaattatcataagaagtcttattttctagtaattttaaagtaatctaagcttaaaataacaaaaagctacttattcacaataagcatgaaacaaaccatggctaaatttcaagtgcagaaaatataagtcctcattaaaataataaaatgaaaacccgtgtgtatctatcacctactacagtctgtagtctgtccccactgttgtgattttagatttcaaatattgtttgttagtatcttaatatcactctgattagttgagtgtaagtaaatcaatctgaacatcccattactggccaatattgtttagcatatgaattgatcacgaaaacataaccataggaaagtaaatatgtatgtgattaattagaggtttacttccctgaagatcattatgtttgggaaatacaagctttgacaaagtctaatctatatgattttctgatttaatcactaacattttatttctaattttgttttaagcatcaaagattccaactcagttaaataatttagttccattaaacccctaaatatccatggtgtcatctgaaagttcaaatggtagaataagattttctggaaaaaaaaaatttggtcctatagtatgttcatcctaccgcctgttttattaacagtagtcttagtatgccaagagttgcctgagaggaacacacacaaacacacacgcacacaaatggtattaataaatttaactgaaggtgttaaatgcagaataatctatgtctaaatagccacttgtttaacaaattaccgtgtttttcacgtttattttggaaacaaagttttataatatttaacctcaggaagaacaaacattggttgctcaattatcctttggctttcagttcactcttagaatttaatgactatcactcaataaaaactcagaatgcatctttctgtttgcctgtggttttcaacattggttgcacatcaaaatcacccgagaaacttgaaaagtatcccaatgtttggggcccacttccagagattctgatttaattggtctaactctaactagctctcttattcagcaaagttgagaatcactagataatgtgatacaagatccgcgaatttcaagctgtctgacgagagcctaaattcagctcagtcaaccatgtcttgtatatatattttttataacagtaagatttcacagtttaaagagatctggtttctggtcctagattatctggataactgcctcaactcatcattcctcttagctataaaaatataagaactattacttactctaaagtctgttatactctcattcccctgaaaaattacgtatcttttttttttaaagtgagcagagtaatttatctgtgaagtgaaataacactagcagatcattaacttggtgcaatgaatgcatcaagcagctgttacttagaaaatagaacatctgttacatgccattggagtcactattcactgtcattatagttagagctgttatttctgttcagttcattctgctttcatgaaattcttctttaataaacaatacagtgttattaaaaagtcaatacacattgctatagaatccactatttaatgctttatgttctttttgaatgtatcattatattattctgtcacattagcctaatagtaaaatatgtcctaaacctctagccatgatagagtaattttgggggctgtaaaagcaattagcatctcatttcctcatgtttaagacatgttagattgtgtgatgcaccattgatatgattacagctgctgagaatttaaaaaaaaaaaaaaaaacactaccactttcaaggtaaaccttaattgtatgttacatctcaatttccgaatccttaaaatgtgacaaatgcacatcttagaattgcagtaatatggcaatgtattccttttctttccacgaatatgttacgtagctaaaaggtgaaagaaccctctcctgttctctgtgatcagaaatggtataatatttgcaaatactaagtgcagaattcacctgggtagggggacttctcaagatgccttttatggatgctttagttagccttttattcatattacagggaacatgagtaagagaaaggaatagctaaaataagtctgaatttaattgagtcctagtaaagggaggaatctataaggaaatgatgttaaggtacgtaggtaaataaatgtggtgctgattgaagataagctctagagaacaggagactcttaagataataaaatttgtttaaaaagagggggtggaaaaaagagatcagacagagaagttatcttaagaatataagtccctgagaaattccaagaaaatctgtggaaggtactggaaaacttgtgaaaatacgaaatgggtggaggagagaatagaggttaagtgagctacatttctttacccctgaagggaaatgtttgtaaaggtgttcctataggaccagatgatttttccaataatttttaccgttctaccattaaataaaaataatgaaaaatgctgatggtataatcagcagagaccaatggagaaggtttttccatcttgctactgtatcagtgaagtgagccgatagctgaaccctgaaccgaacatgcctttttaaatttctacaagcaattatacttgtagatatggggaatgaatcagaatgtattcttcatccttcccatcaacatggggcatgacttcactggaagaaattaactcattatactcattcttttataataaggaaattagagtagcatttacaaattatggctaagaagtagacagcaaatttgtttgaaatcatggaagttagtgcttagtatttggactatttatactggagctatcaaatgttacaaagtaacatatggaaaataatatgttagacattgtgagaatttatagtttaattggattttacttatgtcagatattttcccctctatcataaaaacccttagtgccaagtatatagtttgcgttcaccttctcttgaatctcctgaaggtggacttacaatcatgtcataggtcaagttaaaactgagtgtacacaatcttgctttttcttcagccctaaaatcgatcctagcagcaatcacattactacatgactgaaaaacctaaagtgtctgagttataatttagtgaatttagtcattgaatttgaacttgctccttcagaagagtagatcttctagaaccctctccacttctcacctcacaaggcagaagaaggcatgtatgctgagaatcggatgcttttgaaaaggaggaaatgccatatcttttcagctgtttctttccatctcgccaaccctataaataaggagctccctttgagaggaatgagtacaggtataaagacaatggccaaggcaatagctctaggttggttctccatacatctgaagatgcagacattcttgtgttgtgggaaactattagagccagagaaaatggttcgtcaacaacctcatcaaatgtattcttttagtttacagtaagaattccctgttcctctatggcagccttgtattctaactttcataccttctcgttgcttcgtactttgtctttagtcaatccaaaccatcccatgcacactccgccttcaagtgtcacctttcccttgtagtcattcatgcttattccagccatggctcatctgtttccaaaaaaaaatgtgatttttttctagtatgatatcaaattgttttattgcatttaagctttcctctgcagctacactgtaggcatgattagagtgaggtttgcaaagattacctcattcctcatctctggcagtgaatagcacagtacagactggatattaggcacctgatatacattggtcaattagtatttcagatctccagaaagcaagctcagcatagtatttaaaggctaagtcttatttaagtcttatttcttaagtcatatctttgattaaaaacacatttgagggaaaaatttaaggcctactaaattaacacaatattttttcctaacccaaaacagcatgtatacaaatgattgaatactggttccttattgttgaatagcatacataaaagtttaactctaggtctctttttttacagagtgtaaattgtcctgtgaatcacttttgaccattagcagttataaaccaccatcatatcactgcttttttcaaatacaagttgataatggtgataaattgaacatcttttagttttaatttataattttgtggaacttaagaaggcactagaaattagtccacatttcctattttgttcccatcaactgaacatcactggacattgtttaaattagctggaggaatttggccagatgttgacacataatggtttctgtgacccaggaactacctgcaacattatcccctaagttcaaaacttttgtgatctcttctgagttttggaaaattccattgcctttaattgcattgcttgtcatgtaagaaacaaaatctatgtacacaataactttttacattgatgctaaaatatagtgtcatctttatgaagacttattaagagataattagtaatccaaatataaattaagcttcaactttgtgaagggttacctttgtgaataaatcaactacagcgagatgccagtagactggaatatagaaagtagataattctcatttgcgtatatgtccatctctttgacaaactcatacttggatataagtttttgaaggatggggacttctctaccgttttatcccacagagcctagtaacaatggctaacatctatggttgtagaggttgtatactacaaaaggttgaagtcaaagtattaaaaggaataaaatctagtctatgtctactctgaagttaagctctaaagggtctgtatctacccaaatgagagacttctaataatctcccagaatatattgaggagaattacatatgattctgctacagtagtaactggcatataataggagctcaggcaacacttacgattgataaatgaagaaattgcttttatgaattgctaagctcacctgtgtgcaacaaatagcacctacatatgaagaaccccatgcatgatagctgtcgagttcatctggcattaagtaccttaatttcaggcatgtttttattgaaaaaatgtgacataaaaccatatcttagaattgaagaaacagtgtttttgtcttgcataaaaatttttatacattgtttcctcatttatttctcctgtttatccgatgccaaaggcaaaaccaaaacagaaagtatgagaagtgatttcgagtggaccaggaccttatggcgtggcagaaagacagccacaggactacttaggtatattataaagatagaaaagacatgttgagagtgactctatgaggccagcctatacctaatttcttactcttgtactgtaatttttttcttaagaaattagatgtaggctggcattacagagctgctccttgtgtgtttattaattgattatttgtatctggactttctccactttcctgttattgctgtttctcaatgattttgttttgctttggctttctgtgattaagacatcagctccactcgcaaatagcttttcaactcgagtgccaatcacagtctctgtatctgttaaccttattgagaaaggagaaaaagggtctgttgggctctggctcagctctctgtgaatgtcccacagctggctaactagacaggcagggaaagaaccaggcacagactcagtggaatgccgagtggccacattgtctgtcagccgtgccatgtaccaggaaaggggctttatgcagggcaggtagtaaacctttgtactaagatcactttttccatcactactctctatcttttttcatgttaaatgtgattgttttcatgttttataaatcacctcttaggaaatagtggtattctcttaggagattttagtctagggtatgtggatagaaataaggtctgtgaacttggattgggggaaaactttatctttatttgtattcaattaaaaccaaaagtaagcagttttttcagttaaaatgtgagcaacaaactccagcaatagagatacccatgactttgtcactaatagaaatgacagatacttttataacgtgttccagacattgtacatacttaaaaataccagttatgctcgtcatcactacattgaaattatcctaaagacctgatgctagatcttgttaattaacatattaggaaataaaacatgtattactacatcacaaatatttaaaaaatgtgttgcacattgtatttcagtataattgttttcatttaaaatcctatgtattttgttttatgcatttaaaagcattattatgagaatgggtttttaagcttcaacagatgccaaaaagatccatggcactaaaaggctaaaaaaatccctgctgcagaaatacagtagcaccatactgtagaattttctaagggcagtttcttatttgtggatggattttcaaatatctgcctttagccactacatgtataaattaaataaatataaatatatttagttgaacaatatgtatgtttattaaatatttataatgaaaaataagacatgaattatgcttatgtacatatatatgttcatagttacccaacaatgaagcttcagtatatatggtatggttttcatgattcattaatacatagttataggtttaaaaccttgcagaatcatagtaaccatacagaaagccgtttcataagcattaaatcttaagactacaagacattacttgaaggtcaatgctctccttttcacaggctactcaaaaagagattgagaaacagaaggtgcacctgaagagtatcacagaggtaggagaggccttgaaaacagttttgggcaagaaggagacgttggtggaagataaactcagtcttctgaatagtaactggatagctgtcacctcccgagcagaagagtggttaaatcttttgttggtaagagaaaaggctagaagcttttacacccttctctgtcacgagaaaaagatacataagtgaccagtaacaattctgtgtttgaaaatttctcaattctacgtatatgctggctcttaattcaatatctataacaatattttaatatatttttctttatatttacgcaatattctatatgaaaataccacttaaaactaatctcaatgaaactttattgttgtcttttaaacattttagaacataggaaaaattctttaagaatattgtctaaccaataatgccatggtatgtctctgtacaattaaggaataccagaaacacatggaaacttttgaccagaatgtggaccacatcacaaagtggatcattcaggctgacacacttttggatgaatcagagaaaaagaaaccccagcaaaaagaagacgtgcttaaggtagcaaataaaatatgaaaagtaatgtccaaattgtacaccagttacttcaatcatctttgtcctaaaagatactaaggacgtcttaataagagtaaaacaatcctttcttccttcctttatctttccctttttccttccttccccctttgaatggaaatgaatgattttgaagagttctgtaatctgactttctgttcaaatccatcactcagttaattatacccaatgtaaactccgttcagaaagatattccaagatttattttgaaatcatattgcaaatttctgcctttgtcaatggtggtactacattcttgtgtctaacacaaagaacaatctgacactatcattcatttagcccatctgaatgaacacctgaaatccagtcagctgatttttttgcctatgccatatccaaatcttggtaattagtcttaatgttgggcttatgtaaagctgaggttttcatttttaactacatgtaaactaggctttgggttctttcttttagtctcaaaactgactgttaggatgccctgtcttctttttcaaggggaacttaatcttttctttaaaaaatgattccgataaaagggtatgagaggtgtaatacgcaaatataccttatagacactacattgtttctatttgatgatgtctcttttcccaattaaataggtagagttgaattttaacagctctcttttcaataaacattttttattttgttttgctgcaatgtttgataaatttattgattagttgtttactatttaaagaaaactcaaaaattatgtttctttctatgcaatttatttttatgcctctgatattttccacagattacgatatacctttaatgaaaaactataaattcattccaggctatccccaaaacacatttatgccattgtctgaagcttattttgatgtggatctgtattgtgctcttcattatcccttgatgtatagtcagagatgtcatcttatggtgaatttccttcaaggctttttgaataatagggtctgagttatttaacttcaacctctgtgacccggcaggtcaggaagaacattcctcagtacctctgtatgtgacagaaaattcgtatgtgttagaaaatcactttttttcttatgacactcaatgtaataaagaggaacttgaaagtgctaggaaggaatagaaaagtgttcttcagctacctgacctcctgagcacatacttagttcattccacaactattaaattcagtaacgatataataaaataagactaaatagaatatattatgatagttgcaacaacatagttgggaaaacatccctgtccttcctcggactaaataaacattttaaatagacatgcatcaaacttaaggacggtgatctatttttctgaaatcacacgcattttcattttagtcctgttttatggaagttgtggttttatctccctttgtattttctgcatgtgcttgctctcattttcttactttctctctctctctttctcactcttctcgctcacttgctcactcgctctgtttggctctctttttctatcttgaccttcattaattactaacttcaagtcctatctcttgctcatggaatatagcgtttaaaggcagaactgaatgacatacgcccaaaggtggactctacacgtgaccaagcagcaaacttgatggcaaaccgcggtgaccactgcaggaaattagtagagccccaaatctcagagctcaaccatcgatttgcagccatttcacacagaattaagactggaaaggtaggaagatctactccaaggtggaaacttgtgctaaatggtctcttgcgaaggttgcgcagtactctgaaaggggcaagtagaccccacagcaaggttttcaaaaggaaaatgaatgccaaaatgtatttaaggaaattttaccactgattataatgggagataaacgccactcctccccgtctctgtctctctctgtctctctctgtctctttttctctctcatcttttgctgccatagatattctaggactgcattctatgctgcagtttacatacgtactttcaggggtcacctacagaaaaaaataacaaatagcatgctgaaggccaaaaaaataaataaaaccaaaagcacacaagtcatccatcaacataaagcactaccgataaattttgccaaaagcagtactgatacaatattgcttgtatgtaatgtggatcaaatatccaaaatgaggtcttgtacatcttctgcacggtctagggtgtttttttacctctttactggttgtgcaagtgtgtttgtttaacttgcttttgctagttgtagacactgtgacaaaattcattaggctataatgaaatgatcacgccatgaaaacaaatcattgcaaagcttacatatcctaatttttgtaattttatatgcctatttatattactgtttaagaagaaccagggaatatggaacttttgcgtgatagactttatatttgtgtatgatttgatgaagagaaagtcttatttaataagtagtttgcaaaaatgtataaatatagtgttatagaatttcagctctttgggaagatttgaaatgcaagtaattacctagaaatttatatactgtagtttgataaatttcaatatatatgatatgctttcaaacataaaaatgtatataaaatcaatatatgtatttaggtatatagataattgttagaaataatctgaaatgaaaaaaacattggagtatttatgagaaaatatgatgcagtatgtcaggtaagtattgattcctggaaaaatagaacattttcaaaaaatattttgatagatataagcaaccagtaatagcatggtttcacaattgctgcactttctaaggcattacagtgtctcatcatgttatataatagtacatatttaaagtagttttcaaaataagtgaaatgtgacatgataaattctaaatagtttagcttgtatgcatgagacacagttacccttcaaaattcaccttcccaaattaaaaagttgttagtttaccttaattcattgcaagttatttttaatagttaactacttagttctcttgtactctctctctccatacatagagaccttatatagttgacttttaaaaggctatattctctacatatggagagagacagcatgagagaacttagtagttaactgtcacaaatatatatatttgagtcagtcattattacctgcaaaaaaatgtgacaggctcttaaaattgattaaagttttgaaagaatgtattgttacttacaaagacaattgtttttacttctaaagatatcaatggcttatgtaataacaagacaatgaatggagatttatttcaatccttaaaaaatgctactacttcattactaagatatagacacacacacatgcacattttaataaatcactaagctatagaatatttaagagaaaataaggtattatctttggataaattgtgttacaagattgtggttcacagatattaaaaaatgggtagaatttgctctccaccacagatgtgacagacccagccaatacaagtttgtgaccaagacaagtttgtgagttttcatttcacattctgcatgaatttgtaagtatacttctggaaatcatgcataaagtgatccactctatgaacttcttttattttccctagaaacataaggcataagaaatttccagtgaatattcatttattattattattattattattattattttgtgtgtgtgtgtgtggtggagactctctctgttgcccaggctggagtgctgtggcataacctcagctcactgcaacctctgcctcctggaatcaagtgattctcctgcctcagcctcccaagtagctgggattacgggcgggcgccgtgacacctggctaatttttgtattttggcagagacggggtttcaccacgttggccaggctggtctggaactcctgacctcaagtgatcctcctgcctgggcctctcaaagtgctgggattacaagcgtgaaccactgtgcctggccccagattttcaattatatgttaattaacaaaataatcacatgtttgcttttcaaagtatttgtttttctctaaattagtaaaggcaactgagtgtaacaatgaccccattttagggctctgaagagataattatgctctattatcacgatgaaatgaaaaacacagaaataaagcatatctgacactttgcttatatattcattgcatcagctaatgggattgagcttccattgtgttagagattgtggtgagaagatacaagggtataaagatccttgcttaagaaatacatgttttcaaacagaaatgaatacttagtataatcataaaatatgtttaacactaattcatcttcatggggatgttcaaataatggtgagatgatctcggcagagagaacaatagatttagaaggtaatctcaccagagaaaacagtggatttagaagattgagatttaggcctaactttttcagtagtagccagaatatgtgatttttctgcatatccatttcattgtttgtaagatgaggaagttaaaatagactaacaatttttaaaagaaaacctatcctgcccaaaatattattatttaaaataaagtattaaatttaaatatttaatattaaaatcatattatttaaaattaaattaataaattggaaaataatagagttactagatgggggaaatatctgccattttatctttctccttcctatgattgaattcaggaagtataaattatgctcatagaacatggtttgaaatttctaaattagattagttcataaatccctgctcgttctaaaatttggctattcagtaatcttttgttgattacaataagaaattgaaaacatttaatgtcttgtgtgtgtttgctctggagtagggaagtgctgaagtgctggaggttttagggggtagcctttgatctcaaaatcaggtttctttatagtaggggttatacaggataatattaggttagaatatggcttttctatggttgagtctatgtctaagtttcatggaagagtaacctggggaaaaaaaatactatggtgataaaaaaagtagatttggattgaacacgggtaggtcatagactctttgtaatcagtaatttcagtatagcctttagaacataactctaaagagcccttgaatagagaaataacttatgctgaaaattcactggtgtctagatttactatttggtgaagaatacaaagtggggtactcccatgtctcctgccaggactgttcatgacaagaaattccgaagcccagaaagcagtgagtaaagggatcctcagttcagattggctgaggacttgactgtccaagtgcagctctctgtaatgttaattttggcctcagcaaggagcagtatggtgagagcaaaaagtccttaacttcaagacacaagacctgctttgagcactagctgagcacattactacttagtgattttggatatgcctctttacctctcagagcctcatttctagctacaaaataagggagatgatgcctgttttattttaatctaaagattgtaatgaggatcaaattatgtaatatatgtaaaaacatgcatttaaaatgtattaatcagtgtatagatatgaaatggttaaaaataattaatatcaatgggtatttccatcgttacgtatattacacttgaatggccgaatctggggggttgagacaaaaactgatggaaaaaaatgaaagaattgctgattttctgtggtctctgctgtaatcgactggagtcagaaaatcgtgtctttgctattttcatgacaaagaccagccttaaagataatgaagtggatgaatttaagaactactaaggagttatgtttgtcccacatacgccccttaaaatacataaaaatgctgccttttcccattttattaaggttacctaagagtatccaatgactttgaaaaaagcgtgttttttcgtaatctatgtgaaatcaatgtgaggaaatggcagttttaatggagaggatcagaattgcaacagtcaatcagagataatattagaaccctgagtaaattgacagaatcaatgaggagagactccttgtctcaactgtctctgttttagggcatcggagtatagtggcatggctgagggcaagtggataccatcgggaaaataaggtgataggagacaaaagtataggaaggggcatgggaagacaaaaataaactgattatttattcatattaattatgacagttctacccctctccatccctctagaagccaagttggagaaggggagtcagcaatttgggagagatgctagttgaggtatatctaaaagcactaatgagtgaagacttgagaaaagggattaatcaggatgaattctcaccaaccatatattattttccgataacagtgtttggtagtgagggggatctattgctaggtaaaatacgatggattcaaggagcttactgtttgatgatagggcaagatgtgttcatggatactagattgagagtgagtgcatggtaagtgagtttagcagtcactccagcaacacagaggaggtaacaattcggcataaacatatgagaaagcttaggagcatacagtgtgttcaatgaagagtgagttcctttagttttcagagtagagggcatggaagataaaacttagttgtggatgataaggctgaagattatggctagacacagtgtgaagaggtcatggacagccagactaatcattcatgcttaattcagtatgcaatgaagagttcttgatgtgctctgtgtgtgtgtgtgtgtgtgtgtgtgtgtgtgtgtgtgtatctgtgtatgcactgttgagaaattagtccagtgatagttgtgaggagaattccactgaataatgacatgaagttcgggagctattgcagtagtctagatgagatacactgatgacctcaaaaaaagggatagctatgggagtggaaaggaaatttcagtctagatcagtaaatcttttgtatgcacttgggtgaattgttaaaaccagtgtgctgggccccacactcagagcttctgactcactaggtctggagtggagcacaagagtttgcatttctaacatttttctaggtcagattgatgctgaaggtctagggaccacgcttagagaactgctgctgcggagatatttagaggtagcctagagttaagtcattacatacaaggacccaagaagatgatgaattcaaaaatgactccaaatttaactctgattgactaggaaagtctgcatataaattccaataataggcctggtgcggtggctcacgcctgtaatcccaacactttgggaggccgctgcaggcagatcacctgacgtcaggagttgaagatcaacctggccaacatggcaaatccccttctctactaaaaatacaaaaattagctgggcatggtggtgggcgcctgtaatcccagctacttgggaggctgaggagggaaattgtttgaacccgggaggcggaggttgcagtgagccgagatcgcaccactgcaccccagcctgggcgacagagtgagattccatctcaaaaataaaaattaaaaaaaatttcaataataaaatatgcatcaagttatatttttattgttgtaatacttagctgcaaaataattttgactaaacaaactttaggtgtgtcatattaataaaggcaattattttactttttacaaaatattatgtaatttctacataaaatttgcttagattgtatttttctagagatttagatatacttcactgttctaaggagctgaaatgttaaattatttattctgaaattgatactaaccagaaaaaagtgaaattattttctctgactttgatcctttactaagacttatttgctataggatatatctggcatatgttctttaatttccatataggccttgaaaattgctgctaaaattcatgtagcagtttctatatatatgtattacaactgtaatatgagatttggacaatcgggcatcaaatacttaaatattcattgtttgattgctgcaataattgtaaattaccaagtttttttttttttttttttttttttttacttccattcagtgtcagaagatataaaagtaatcattctttggataagagactttcacaagtttataggaggctgtgagagagtcagtgaccttcccatgtaatgtagaatatataagaaaaagaaacacatgattgggcctaatctatcttaaaatatggttctatgtgtggaaaataattaagcagtgatttaattattttggctctcctaaacttcggtgggaaataaatgatgcattttataaatgtgatctagaaggtccaatgaagatgtattggattgaaaatttttaattaaagcttaattttctgtagtcagatttatcaatgcaaatacattgatattttgcagtctctttctgatcgtattataacttaacacctatgatggaaaataatattgtatcttaattggaacagtattcttgctatatatattctttaaattttaatttttttaatttttgtaggtacattgtaggtatatagatattcatttttagtaaaattttctataaaaacatgaaaactgagatgaagacttgtaaatattgcataatttgtagagcattaaatatgtaatatttacaactaatatcttcaggtaatagtaacagatcactagtcaaactgtataatatctgcaaattttattttactaaaatgaatcagaaaaatatgaacctaacaacataattcttatgttagcttattttttccacatgtgtaattggttatccctataacaaggttaagtccattgaaacttcgctaataaatccctttggtaaccatgtaaaatatttttaaagtagatgtgtaattgagtttggtgagcagtgtcatttgataaaactatctgggtcttgttagcataacatttgaaataattaaagctatttggtgaatcttgattgttctcctttgataaaggaaaattagtcccctgatcagtgtcagtagatgtaaagcaattttgctttggaccagagactttcagatatttataggaggttgtgagagtgtcagtgagttgaccaagttctcacagttagacagtgtggttagcaaatactagatctcagtccattgctttgtccacttcaatacactgactcagcatagtttactgcctctatttatgtcataaagtagtttttgttggtctactatgtgttagtataaacatacccaatttcacttcaaatacagtgatttcgttatactttttgtattaaaaatgacaagaacaaaaggtggtagggaggaagaaatggaagaaggaagggggaatggaagaaataaaactggaaaacaacctaagtaaatgaaaagaaagtttaaaatacaaaattgcttaaagtgttatgtttttacttttgtctgtctcccccatacattttagagttaaatgttttcctcttttaattcatttcctactccaaaaagtcatgtaatcatgaaatagggcaatattctaagttaaactttataaaaggtcgacagtaggaagcagattcttgacccacgaatatattttgcatccagttttaaaatgtgtaagcatgaaattaacctcatccatacaaaatcaattgaaatctactgggtaatatcctctaattagcctcacaaattagtcacattttcacatttttattatcaaagcattaaaggtaaaccagtactttatctattctcaaaagaatgcaaccaatgaaatgtcactatttggagtcaatttatttaatttaaaaataatatttcttacattttcttgtttgctctaataattttaaaataatagaataaataagtttataaaccatattttaaataatctttcttctagcatagatgtagtatctttccaatacacttatttgtttttgtaagttcttttcctctacagatagaatgatgtgaaataactcttcatatcatatcagtagtctgtcttttctgtactatagtgtgttacttgtccttgaaatttttcatcttggtttccatgaattctttatttttctatatcaatattgtaatgataaataaattttcaaagctgcagaatggaaaaaggagactgatggatttgaagcaattttaaaccaatctgtagcacttggattatttattttcaatttaggttttagtgtgatttgaatatagtggtaatttatcatgattattaagattccatagtccagattaacaaatgtttacttgctgtctgtgtaaacacagtcgttattatgctagtgtatctgtgcatgccaaagtaatatttaaccaaggaaagcttacattttaaaactaataaagtgtatctgagtaattttgaatgctttcaatttacaatgaatcagtttgtaattgatcttgcttttcttcagtctgttatcctttgttaacttgttataaaattcagctttaatgccaaaacttcaacaaagccttaaatttcattaatccttaaataatccaacaaagcacaattaatagttgttaagcaatttgaaacattaaaaaatcaaggaaaacaaagtgttgtctttctcggtttctctgtctcttctttatgtgtccatttatccatttattatacttccctgtcttctaatttatatgtattttgtatgactgcacagtcatgctaaagctcttaaaatgaaaaggtaagtaaaaaattaaaagtgtccaaaacctatgcttggtatacactttctcatgcaatattataacttttgtttgattattttctatataactaaaacctattttgtgtgcactgtctaacattgtgtgatttaattgtgattccagttcttttgtggtcatctatttcctttaaagtcaatagaagtaacttacccaataattaagatgatttatcagccattgctttcaactgttttagacaatttatcataattctgaattgaaaagcaggcatgatatactttgtgttttaaaatttggtgactcaagaatgagctgttaaattataaacgctttcttattacatgtttcctttataaagttgcataagaattccaagttacaaagacagggaagaccaaggaatgacatgtagaattttaattgggtgggaaagtgttttctgttttagaatgggcatagcctaatgctgaactagtgaactcttaagaaaagcaatgaatttttttcatctctttgtgtccaaagactattaatcatatggctgtcaaatggctggtgctatcttgccaataacatagctaaaacaattggtttgataaacttattttggttataaaattggtcactggttgattaaattaatatataggtagttctaaaactaccgattgatataataagcaccttttcctgtataaaataaaaggcagtgttttcactggaaaatagagtagtataagacatattgccaactttaaggatggaaaatttatttagagagacaagcatatatctttgaaagccaaataatattatattcctgtctataagaaagcagtgcaacacaagctgagatacacataaatgagaatagaaactcctgaaataacaggtcaatcccactcccgtaatttttcctataccccgaggactgcctgaaaatttcactcagaacacataatgcaagataataagaccgacgtaagaataatctaaattcaccacaagttataaacaaaacattactattttattcaaagtaattatgagatattagttctttacaatgttatgagtataatggttaatagagctctatactgcctaataaggtggtcatgaaccacatgtggccactgagctttagaaatttggctactccatgttaagatttataaataagtgtaaaatatgtgtgggttttgaagagaatataaaatgtaaaatattcatatttttgtattgattatgagtttatacaataatttggacatctcagtgaaatcagtaaaattaattttatctgttttttgttttttactatggcaactagaatatttaaaattacatatatggcatgtattatatttctattgagctgcactactataaaagttctacttgaatttagagacaagaacttactgtaaggttataaaattttaagaaaatgtctgtgtgaaaaggattttgttcctaaaatgtgactgaatacatcctcatctagtctctgcttataaacatttagcattacttgaaaatcagtgtttttaaaaaaattgcagtcctcatcagttgttcttatataaacctaaaatttaggctccaaataatttttgcccactgattttagttaatcactttgaaactacacaaaataaaactactcaaattcttaatcttcctaatttttttaaacaaaatgcacggtagtctttcattggaaaatttagaccctacacattgaactaaagaagtctaagtttccattatcttgcctgaataattagcacttcagtttttggtagtctctcccaaagctctttttacatcttcccccttttttgtgtttacctggtggtatcatgttgcttagcatttgggcagcagttaatatacatactcatataatgctaaccagtcaggtcttttgacatttctacatagaaattgtgttatttaaaattccatgtcactaaaaaagctccttgaaatgtctattttggccctcaatttttagtcttttgttcatttattttttcaggaaatatttacttatgaatatttactatgtaccagaaatgactgtaggttgaacatgagaaactcagctccataggatgtctagggaacacaccccactgactgtatctgtggtatgccttttctgtctccaaataattcctgattaaaaaaaaaaaactgcaccctgtaaactaaatgcaaggctgtgatatcactttttatattgccgcagataaattaatctgtagttttgttcttcaggattatgtaactctaccaaactggaatctaaaatcctccatgttcaccattacaatgttatgatttcatcaaatcccttggtaaaataaagactcattatatcaataagcatgtattttatcctttaaaaccatagatttcaaaggaggaagggcttgacctgagccaatggatgattaggattttgagaggatcaaaataagacccaagatttatagagcatgtatttatattggatggacacatagaagtttgagagaaaataatagtcaacatttattaagcttttattatataccagacaccattctaacatatttgatcttagtaatagccctgtgaggtagatattcatcttatctccatgttataaagaaactgaggttcaatgaggataaataacttgtctaagttccctcagctagtaaatggtagagcccagattcaatctatgcattttcatacagaagtttatgttcttcactagaagatgaaaagtattctaaggtcattgaaggaggcataacagaagatcaccaaatggcctgcaaaaaaaggtctatattaggaacacttacataaggctggcaagtctttggggcaagattaggagaagccttgactactgtgctggaggttggactttattctatttatactcaatagatgcaggaggttcttcagcaaataaatagcataatgaaagaaaggtttttgaaacatagtaagctgatcattgggcacaggctggaactggtttgactgaaaggagattttacatcttttcaaagcttattgccttagttttgtgtaaggaccaggaacgatggagtctctgggaatacaaagcaagtggatcatagcaagtcaattgacacttacttgatatttattagacattagagtgagatgttcaaaaatagcatgacttacgttttacgcctgaatgactgagagaaatggtcttccattaagagaactagggaagttagtattgtaagcagtttgcgggaaagataatgtgctccatactaggaatgtgaaacttcaggtgaaaattcagctggctattggagagtctagatgggaattcaaaagtcagataacagcttagggtgaagacttggaaggcataaaaaattgttaaattcgtagaaaattgtatcttaaattaatagaagttaaattcatggagagatgagctagagaagaagcagttggaataaaacaggtaaatctgactgtaaatagacctatgttcttctgacatccaagtacacaataaaagttattttcaacattatcattatgtattcacaaaatcacatagaacatagttgctttcattaaatattagcaaatgtgaacaaccatttaataacataaaatatcaccaaattgataattgtatagttatgattctaagggttgttaatctttttacttttaccgtcatctaaacagtgtatgattttattgtaccgtaattgctaataatacagacattgaaactttaagcatgtttgtaccactaccaatctatactggttcaaataacttatgatatttcaaatggcaaatgatcattaggatttaaaaactggtactgtaataggtcacttaaaattatctcataaatctttcaggggtgtgtagaagtacctagaagatatgtggttattcatgttgcatatgagaatcatgtcatcatgaatagaatttgattattcacttcttcaatagtgacagattattacctttagatatttagtttttcttctacacttatccgtattgttcaccagaagttgccatctaataaaaattcaacctcttcctgggaatgtgactggagaagggtaggtggggaccaaacttgatgaatgtaatcgtcttggcaaaagacacgggggtcattcctgaattggttttacaaaagtaaaatgttttagctctgaaagaaaatcagatttctgtatgtcatctatgggttttcaagagctatcccatataaaatatgttctagtgttttaatggaaagaaatacagcataaagattgagagagtatcaatgtattttattaacagaattttaatctaataactaaaccttgcccacttttttgaatatatatttgattttccatgtcttttcacttatcactccttttcaagggttttgtttagaaagtcaagagattttaaagttttcttagactggtcattatcagttcaaaagtaaagaaactgatgtttacaaggttgaaaagcatagattctttatgtgaaatatattaggttcattcgtttgaatttatttgcatcaccaaccaaactgttcctaaggcaagctaatggcattgtcttagaagagcatgcctgtcaattgtgctgtgctaaaaatgtcatttaaaacatctgagcagattgccatgtagtttttctaaggataagatgacaattctgcatttctacctgaggttactgttacttgataaatgaggcaatttctgatgagacatatttacccaaatgtatttatatcagaatatttaaaataaggtcaaatttgactttagaatattaaaaattagcccattcaaatgtatctgtaaattgactgttgttgatatcaccaaatgatgaattgtactatcttgcatgtatgttcagctctggtgatgtgaaatgtttctccttatttgcatcctcaggtacttttccagttgtatttcaaaacccttcataaaacataatatggaaacataatgcatgtgattagtttagcaacaggaggttgaataaatgtatttcttttggtttatgtttctaataaaaagtaattttgatttaaagtagcactatctttttttttaggcctccattcctttgaaggaattggagcagtttaactcagatatacaaaaattgcttgaaccactggaggctgaaattcagcagggggtgaatctgaaagaggaagacttcaataaagatatggtaaattggttgtgataaaagtgtgaatgaactaggagtggaaataaatatttggaaagaacttagataagtctccaactgaattttcagagcacatattacacattttatgattctaatgaattttataaatgcagaatattcttggccttttattacaaatgctgaattactatggtatggtaatataggagcacttacggtttctaataaatagcccagcaattttcttttgacctgacctacttttgaacttatcaagggcaaaatgtaattggaaaaaagagtcgaatcataaaataaactaaaaatttaataaaatactcaactatcatagatgactgacattttgtatcagcaatgtttttggtagtataacatttatttcaatgaagagagaataatgcataatatgaacattatttattacaatttcccacaaagttgttttaccaaatagttgtttagttagtacattatatgtctaaaatgtgtataaattcatgctgcttatttcatgggagtaaagaaatatgaccatgtgtgctcttcccaacctcagaatattctccttcaatcccaactaatttcaaagtatctactacatttctctctggcttgaatatttgtacatcacatccttattaactgactttttttttctctcttcatcctccttttcacaattttttcccctctttcactgccatcacctctgtggcattcttaacctttacaattaccagtgctagagccttctcagacaatgcttgaaagtgacatcagaagacaatatataaattttaggtaataagtgtgtgaagcaataggagaactattcccaccaatcttagttcccacttcctggagctgcctcaatcaatactccccatgtatggggtttggtggccttgccaactcagcttgtggaaagacggaagaggctttccaagttgctgagttacagcaatctctacttcaggtcaaagaagaaactagagggcaccaagatgaaaaaaagtactgattacctcttgggctgaccccaactctgccctagagccctcaactggtatagggaaagaagtgaagtgggttttttaattttttgttgtttttgtcctcagccctagaaaatgctacagacttttacaacaccttttaaaataagtaaagtcttttacagactataagtatatgatgtgtctatattatgataagtatataatgtgtctatattatgccgtatgtttctttagattattgaccagtctctgacaaaaataatccctttcccccatacaaaatgaatcagtcctcagttgcgtgttgaagtttatgcattatagatttaaatatataacatctaattccttgaattgtaatacacacatacaaatacttgtgacttttgaaatttattatttgttttccttatgtcatcagtgtaccttgagtaccattacaatgtgagactacttgatacaaagttttcacattctgagttgaaagaaagaaaactaaaggtgaaaaatcacatggtcatatatgcgactatattagaccagcatttattcaaaacattttatttctaagtaaagaaaattaagatattgttcttgcagcctaaaggaacaaaatacccattgaaaatgtttaaagccattttccagtccatattttagtattatttgatcgtatttaaattaacatgcatatatgacatattttagaaattatttgatggtaacttagcacatgatttttattaatatcctgatatttctcctattaatattgagcatttaggtttcagaaatgaagcaggagttattagataggaattagtgtacatttaaatcaaaatattttcatgtagttgtgtgttaatattttcagatttgctgttatctcagtcacaaatacacatctgtattcctttatggatcagttaacattataaatgataactttagctcatttctctaatgttttaatttctagaactacactaaaaaagccaaaagaatactttcacagtaattcatgacttgtctgacatgatgaagtaccacactcccccatctttctacaggtgcccctaaaaatgtgttctttacaactagatgggaggaaacttattttgaaacctcaagtaccaaatgtaaaagaaaggctatgagcacagtatcttataatagcattccatgaaagttttaaattggatttttgtgtgtgtttaaataacatgtcttattatctctgttaacaatgtacagctttttaaaaaccaaaatgaagactgtacttgttgtttttgatcagaatgaagacaatgagggtactgtaaaagaattgttgcaaagaggagacaacttacaacaaagaatcacagatgagagaaagcgagaggaaataaagataaaacagcagctgttacagacaaaacataatgctctcaaggtattagagctaaaattataatataccttgcctgtggtttttttttaatatatagggtaaaatataatgtgcattaataaaatctgcttcagacttagtcatcagaaactcactttttctgttcaatgtgtatgctttatttaacatttttgagtggtatttgattttgaacgatgtgttgcttaaaagttatggctttttaaagacatatttttctaagtagtaattgaaagatgggaatgcattcatagtacttatacatttaattttctaatgtgctttatttttatcagctactttatattgaaaaaaacctgcctaactgccagaataaccgatctacatgtatccattattcctgctttctttacttaattgattttgcttgcattaggtccaattttttggtaacctgatacttgtttaataagccctagattcttttatttatttttaaaactttattatgcctttaagaaagtcactctttgcaactatctacaaagtcaaatttcatttatgtaggaatcctaaaaaataatcttagtgcccttgaataagaactgctactttcatattaagcagtgtagtgtatggcttcaagtccccaggtgactcatctggtttgtgcaggaagagcaggataaacttaatttttctataataatatctaggaagttcttgagactagacatgtggaaagttttgtgaaactttttttttgtatatgctttgcaataatcactatttgcatgcatggctgattttctaatacttttaattgctgagcttttccttgtaaatcactcttttgagctatgtagttatgaaggtggatccacctagcaggtagatggagtctgctttctacatgcaaataagagaataaaacctttccccctatagtcaaccaaataaacactgctgagaatgtaattacacaatattgtgcctgcaaggaatccacaaggaaagtctaattggccagcaggtgttctgaaggtaactgctgataaatatagtaaacagaaaaggcctcttcctcgagggagtgcaaaagcacaccataatgtgtctagaaaatcggaacgctatgtaactcacacccttccaactgtgagcaagctttcagaagtatctacactggtcgtatgatggtgtgtgtcctactgaatagcagtgtttaatggtcatctggcattcctctaaagaaatctacatgacatctctaaatattttacatattatacatcactttgtgcttaggaaatgaaagatgtttcagattgatgaccaccaagccctttctcctggcaaagatgtgagttatgtcacaaataaggcatggctcaactctaattcacgtggctgtatcttgctacctttgaaaaaagcagcgttcgatctgactcctcagaaggtttgaaaattcaacataaaacataaagtacagcaaggtttaaattcccaattttaaacaaactagataatgaaatgtagttcattcttgcaaatacaggctataagtgattaatcaaaatcgtcaacactactcgccaaaccaatctataccaacatattcaataactttttaaacctgtcaaatagttccaattctggtccttatgaaatattttagagaaggtcaaaattttccaatggaatgaaatttttagaaattccctgatatttattattttttcgctcgaattaaacctgtgaataaaaccctaattgctactttctgtagaaatgaaagctgcatgcagagcttatgttcccatgaattataaaatggcattttgagtaattctattaatcacagaagatattgagtgtgcttgtaaagagcatgatgactgatttcctcccattgttgatttattaaattagtcttatcacattgatttgaaagcatgcacttgctgttttcttttttcaaatagttaattgttttgcatttagagcatgatttggtatagtaagataaatgtggctatgcaagccttggaaggagaagcatttatctcacataattttttattagttatgttcaccaatatacgaacagtggtgacacttctacacatacagcttggaacagtttataagacaactaaaatggctttatatttctaatcataaaatattaatggcctatgaaactcttatgtaggcatttctaaaaacatgaatgtatattggttgagtacataaagttttgttgatgagccccaaggctaaagatatacattttagaattttacctattttaagtcagatacaaactcactaggtttgtgagtttgtatctagttaagtcaattgtattcgtatattaaactcttgcacataaactacacaacagttagctcattaagagtcaattgaatgtgacaaaatttttaagcaagtttgaacatgctaagagaaaatactttaagtgtgttattcaggtttcttagcttcctatacatgggtcccgcctcatgcataggcaatttaattatgtctttgtatattttgcatttaaatatgattttaacctaagttgtacaaaaagatgagggacgcaaattattttgataaataactgcagccagaagtgcactatacatatatattgatattttaataatgtctgcaccatgaacaggatttgaggtctcaaagaagaaaaaaggctctagaaatttctcatcagtggtatcagtacaagaggcaggctgatgatctcctgaaatgcttggatgacattgaaaaaaaattagccagcctacctgagcccagagatgaaaggaaaataaaggtaatgttgttttagaatgtcaataccagattttattatacagtttaattaacctgtgaagatcatatttaaaatgttgatgttcttgtttctattaacgttctctttgatttgatgcatttccttgtattgtgtgttgttttcagtaaatgtattgtattaagtgttattcaattgacgtaatgttgaatgaataaaatgttttagactatgtaaagtgatttaagaaatgtgatgtgttttctggtaaaattgtaattgactttgtgtatctttgttccagatgaactaatgacttatcggtatatggacgacttcttactcatgttagcccattcatttcatcagagcatcttcacacatcagtgttcactctctatagatttatttgcatattgtctaaatatgtttttttctgttattattttacactttttattttgcttcattctctgttgagttcctcaaacctttaaaaaggaaataaataacttattcacttaccctctaaattatattctatgtggacggtccctaataaataatgagttatcactccaaattgtttcaaatcccaagacaccagaggaatttagaagaaagaaaatgttagaccaatttcaatatttacttaattagaatatctaaaaccaagcattcaaaggataactgaaataatatttgggttattgagcgaggatgacagtcatgcctttcatatttgtaaacttcaaaggatgacaataaagggacaacagcctttgaaattttgagagaagtatttgctgcttgcaagtcggttgatgtggttagctaactgccctgggccctgtattggttttgctcaataggaaattgatcgggaattgcagaagaagaaagaggagctgaatgcagtgcgtaggcaagctgagggcttgtctgaggatggggccgcaatggcagtggagccaactcagatccagctcagcaagcgctggcgggaaattgagagcaaatttgctcagtttcgaagactcaactttgcacaaattgtgagttgttactggcaaacccacgtatgtgtttgcaactactactctattaacagaggcctactaataaaaaaaaaagagacaaaaaatctgggtacagttttaaacttctaatgtacattctgaaagtgagtggtttccctcactttgggcttctgtaacactagtgcttaattttgccaattaaagacacaagaaattaacagataacagggaaaaccccttatcaaaaatgaaaatacatcttaattttttttgctacatcatttttcataacattggcaatgttaatttgtcaatttatcatacattcactttacttcaatgtctaatccaaaaaatatgtattgctttcctgagatcatcccatgctgattttactttcttaatgtatacatgataaataataaatatttcatggtacatcttatgtcaacctgcataagccattatctcattgacttgaagaataatagcttaatcctcacacctggtttaactacttaatgggttacagtgcccataaaagaactggatgcctagtaagatggttgctaattgattgcagattgaacaatatcagataatgttattactgaaatgttaccagccaaaacaaaaaggagtgactgctcttctttcaaacaactgaatggaaagtgtatggttctctctttaaaaaggcgattcagaattgttagcttggtctcacttctttatttgtagtaggtataaaccatagaggttttctgacaggtacatttttgttcctattattaacacttgtaagatgaagaggaatgatcatcatctgtaattatagaagaaagtactcctcacaaaaccaggatgtcaaaatctggaaactaagtctttatagttaagttaggttgaattatatgaatcaaacagatactcaaccattttgccctatgtaaataataactgcatagggttcagcccatgtatgagacttcttgggaacttcttctgtgatagtgtcagttccatttaatttggtgtatatttttaaaatgtcaaaagcagttaccataacttaattttataagcatataagggaagtatgttgcatattattgtgacttcttttaatacttcaagaaaattaataaatacactgttttctgttaaatctaataccctaaagtttaatagcaggtgaattattctgagcaattggaagaatacgagaaatagcgaaactgtattgcatgtgaagtctaattccacctggctgaatgtttcagcctattatccttcatattagatgttatgaatgtaatgtgtcataaataaccttacactaaccagcaagcctgtgtctgcagatgcaaaatgaagcgaaagattaaggcaatcaaaaagaaaattctaataaaatagtttcacctcaatttaatagatcattcaagggggagtcctttgctttgaattatctgactactaactcatttctccattccaattttccccaggtcttgacacacccaatatgcaggtttaaaattcgttacaaactaatcaagttgctaatgctttatggctaaataggcacaggatcaaaaatctccataaaccacttacttaaaatgccattatgtccctattcatagtaggctctcaacaaatatttgtacaacgtaataatgactggtgaaataaaggaagcatgtgtgaaccagtatatatttttaaaaaattgtagtaaaattctgggatatattttcctcataaacgatttattcttaagttttatatattaaagatccaaaattcagaatgtgaagggggctatttttgtgttaactcttaattatccatgataataaagtaatcacaatctgtatgaagaataatcaatttaatattgcagttatatttggcatcgtattttaattagaactgagggataattgatagatgataagtaggtatataggttggtaggtagatagatagacaggtgggtgtagaaatattcaagatacatctttatacttgaccaattgtcaatgcattttaaaactaatttcactgtggccactgattagagttatctttcccaattcttacgccctagagtcatttgtgatagtcacagtaacagcttaatgaaaagtagtatttgatataaccttacaatggctctgatgcagcatatgccatagcttcagaatttcttacctccccctatattctccttctctaattgtttgatttttacttttcctaactgtccctttttgtttttctagatataaactgtaggcttaaagttcatctttcatgtctttacagcaacatgttgaaatagtaagcggtactcttaaaatgcttagtatgtgagagctgagtgagtttaaaatgaaaaattaattttccttatctcacagataaagactcagagaagtgctaaccactgtaaaattaaggcatttaggggactctgtccatgtcagagctatatatggtagtaataaagctcagaaaaggactgagactttgagggaacaatcatgaggcagcgcccagccacacaggaatgcagaccaaagcatagtagagggtatctgcaaattgtggtcctcagggcaaacctggagatgataaagaaagaggcatgagactgggaggacgcaggtaaaaattttaccagatattcaaaatgagagaactcctgccttaattaggaattccaatcatttctaatatatttcctgttggtttagaaactaggttcctcagttaagaccaagcacggactgtaaactgaggaaaagggatagttctataggatgtactatcacagcagtgtggtctagtaaaattaactcttggataaacagccttgaatatgaatcccagtgactttgagtgctgtatgatcagggataaactgagtctcatttacttcatctgtacaatagagataaggatgtttctgaggattaaataaggtaatatttgtcaaacacctgctgcgttatgcaggctcaatgcatgaaagttttcttcgtctcctttctgtatatatattaacattggaaaatagacataatctttaatttttaaaatattttcataagtcattaagagaattaagtacgcagcatttgtttaaaatgttaacaacagatatctcgttcagtgaaaatttcaaatttaattctataatatataagcagatacttttctctagattcacagaataaacacaggaaatatcacacaaatctgatgactgccaagaaagggcatgattttccctaaactgcccctcacatcattgtagcatttggaaaataacctcagagagcccaggcatttgcaaacacaaaattatacaatgaagataccactacaacccccaagggtcatgtgaaactgctaaggaacataagcttacaaactaaaattatgattattgtggaaaaaaattataagcaatgttatcagatgccaaacgttaaaaggagaatgtatacctgaagaaaatagagataagaggataatcaccaaaggatattaagtaatttttaatgttcaaaaataaaaattaaatggatttttttccagtaagaataggccattatataaagtgaaaacgaagatttgaaaaaacaaagtctggaaatgaaaatataattaatccctcaaacatctgcgtgaaataagtttcaagttgaaaaaaatagggattatggggaagagacaatatttcatattaatgaaatttaataaaatggaataaatgtaaattttaatgaatcctcaaattcaataaaggtcaaccaacgtggaaaaaataaaaacaagtctaccagctagctctgaatgaaactcagagcatcagtaatcaaaaaggtatcattaagggttacttaagacaaaagaacatttacaggatgacaatattgactgaagacttttcatcaacaatagatattagaagacagttgaataatatcttcaaaatgctaggcacattttcaaataccaggtaaaacatgattcaagaattaaggcaaaatattctcagacatacagctagtttcacctgaacaaaaactaagaatttcttgtctatagatttttgctaaaataattactaagcaatatatttgtgtaaaataaaatgaaactagaaggaaggagacagcgatgtaaagctgtataaaattgttttctctgtaaataagaacatttattaaaaaagcttataatcctaaaatttggtcagtgccaccaaggaaaacacagaatactaggagaatgcagtgtttgactgatcctgtgtaaagagagagaaatcaaatagaagacttattgcatatcctatgaattacatatccttaattcatatcctgcatattacatatgctatgtaaagggagataaaaacaagacttattcgagataatggcaacaaatataaggcttgtgcataatgtgttctatgtaaattattaccaattataatgtttctagatagcaaaaaagtgctaaacctctgaaatatgtatacatacatgacctttccaagaacagcagcaaaaaaatacaaaaaaaagcccacttcagtgaagaaaaagaaatgtccattttctaaatacatttccacttgagctgagcatgttatgacatcaaataccaagtatatgatcttgatgtttaacattttatatccaacagtctcttatcttggatgcctaatgagcatctcaaacatacaatagccaagtgaaaaataaatgatccaccccccatctacgttaattggcatctaccaacatctccagatgttattaaattgcactattatttacttaagtcagaaacctagacatccttcatgattcttttctcttacattaccatgtaaattatttccactcttgttggatatacctgcaaaatgcatcaaatcactcctccgtatctgttatggaagtgctaatctacaagattattatctctcatctggattacttcaacaacctctaacctcttcttccagtctttccccacttacaccatatttctcctggtgaaggcagagagctccttctaaggagttaatgagatcatatcaggcccctcctgcccattactctttaaatgaaatcctgtgatccgctatatgatgtagccccttcctatcacttctgttactcacactttgtctccctttttgctcttctgctaacatagaggcctaaaggtttcttttctatacttaaacacaaccaatttcatttccatatcagtatctttgaacatatttttctaatggaatatttttcacctagaattttgcataggtgctataacttatttagatatcctttcatttaggaacaatgaatatttagtagaactttgatgtataatctggttatgtaatgtagtagtttctgttataaatgttttatattccctatacttatgtatgcaaattcggagtttaagactgctcgttcagaacatcagtttctcttacggttacttctagaagtaggcatactaaggaaagacacagcttctggaacataaaagtgaggtggtaaaagatgaatatgaagagggttacaatattgtattgcaatggatagcttgtcctacagcagagtaattgtaatgggatattttgacaaaattaaagtacacatttccaaaatatacatgctcttggaaggctgatagaaaattaaccttgtttgtagattaaatgctgcaataaatgtgttatttaaaatagtccttggctgggcgtggtggctcacaactgtaatcccagctctttgtgaggccgaggtgggcggatcacttgaggaggagttccagatcagcctggctaacatatataacatgtcatgtatatatatgacatgctatacatatatacacatgttatacacacacagataacatgttatacacgtatgcacatgttacatataacatatataacatgtacgtatacacacgttatatataacatgttatacacacgttatatataacgttatatatacacgttatatataacgttatatatacacgttatatataacgttatatatacacgttatatataacatgttatacacatatacacgttatatataacatacacgtatacacgttatatataacatacatatatacacgttatatgtataacatgttatatataacatgttatacacatataacgttgaatataacatgttatatatgcacgttatatataacatgttatacatatatacacgtgttatatataacatgttatacatatataacgttttatatatacatgttatgcctatatacacatgttctacgtatatacatgttatatatacatgttatgtatataacatgttatatgttatatatacatattatgtatatgttatgtatataacatgttatgtatatgttatgtatataacatgtttgttttataatgttttatatataacatacacatgttatgtatataacatgttatataacatatacacgttatatataacatgttttatatataacatacacatgttatatatataacatgtatatataaatgttataaatacatgttatatatacatgtatatacatatatacatccatatataacatatatatacaagttatatatatatgttatatatatgtattatatatgttttatatataaaattagccaggcttgctggcagttgcttgtaatccaagcttctcagaggctgaggcatgagaattgcttgaaactgggagacagaggttacagtcagcagggatcacaccactgcactacagcctgggcaacagattgagaccccgcctcaagaaaaaaaagtagtccttaattgaataaatttgtaaaataaacacctatatattgtgaatatttttccactaacttttttaagttgtttgaatctgaatagtattatacattcacaaagagttttcacatgcatctagtttgatcacagtaatgaccctctcaagtatcattttctttgtcattttactgtaagaaaaattagcataaatgaggttaagagatttgtccaaggatacatctgagaaatggaagacgccaaacttgaactcactgctttccaaaacatggtgggagttattaataaaaaaggaaaaaagtttcagtgtttaaacaattttggtaaacagtagattaagcaaactttccttactctataactttctagtgcgtttgatatgctaatgggattatgactttctatgaaggggttagattctatagactttcacatctagacagttgcagtagaaaagggaaatttgatttcagattgatgaaaggtttcttatttgagtgatggtgaaataagaatattctttagaaaaaaatgggaagaacatcaccgtatcattattcttctgttgtttgggatttccttaaatttaagcagagatgtacaagaaaagtaataacagaactgtttgccaccaccttatgtaaaataatgtctgagcctagatttaatggtctgctacacattttttatattgtctcctatcttgtaataaaagcaactcattttgagaataaaattaggggaaatatattgtctttgcataattgccacatagattttcttctttgccttgaaataacaacaaagattgtcagctgccagtgcaacatccttggagaatttgggaagataaatgattttcttatttagagacagaatgttctttagcaaatggaattgtaaatacaaaagactaataatggttgttaagggaaatgttgcaccaggatgtagctgtttgtagaatttttctcctctcagctcaattttgtaattaacatattacaaggattaaaaaagaaattagctaacattttatgtttttctagattgttgatgatcatagtggttataaatatttgtacggagtttttttgttctagtgtctagttgtgtagcataatcagtttaatggttaagtagaggcatgttcagcgagtatcagcttccagaaagatgacagactgacttaattcctcaccccctcacttcaaatgcgtggaaattctgaataaaatataatttttaaaagttttaaatacacagctgggctatggtggaacctctcttccctctgtgtgccatgaatgatcaaatcatcttacgtgaaactgaacctggattgagagcctaatggctaggaagaagttttcaagaccttttaggacaaaatatgtgaccttcaacaacacataatatagaggtgaaaataaaacccctccttaaagtctgaattttcaagggcttccctcagctgtaaaggggaataaataaatcctacccacaatggagaagaggcattatctgtagtgataatagcttaggattttcaaaacttaatagaaattccaatactccgattgggaaactgagcaaatctgaagcagaaaagattattaaaaaaaagaaatataagtatagatcatcactatgagacgatgaatctgatgaatccaaaaaaagcaaagaaataattttaaatactgctgtatttccttagaaagtagtgacacttaaaatggtacctggttttagagcaatgatagaagccagaagacggtagaataatattttcaaaaacaatgaaagaacatccacgtaggaacctagaattgtgtactgatagaaactctctttcaggaataacattgaaataaagatcttttcagacacacagaaaccgtttactagcataaaattccctttagaggacgtcaagattggtctttaagcaggagaaagatacaagatggaagatttaagctgcaaaagaaaatgatgtgcaaagaaaatggtaaaaaaatggaaaagtcttaaataaacatttaccgtgtatgaaagtgtctattaaaaaacagaaaaatgctggacatcaatgaaacatgagaaggtggttaagtttttcatccagtttacctgctacctttctatgtattgtttctcagtttccataggtagtacctacttctctaatgctgaaatgcctcagtgctcagtccttgggcacttgccatttttatttattctatatatgtcttgctgttttcatccagcctcgtgacttgattaaaacaaaattattcttttcccctcaaatgcagtggaagcaccgttctttcaaattttcagagaaaaaaaaaaatctacgcatgctttctttagcctatctctacacaatacacagggacaacatttgaaaaatataaaccatatttaaatctgatcataatccttcaatgaattcccatctatttttaagtgaaatccaaaactcttcatgaatttcaagggatatctgacctggctggcccacttcttaactcaggccttatctcttaatactttcctctgctccacctatgttgacccctttgctgctgctttcacagatctgacatgcacccattgcattgtgtgctacctctgcctaaaataatcctcccccgtttctccatgtggctcttttcgtttctgccttaacttctttactcaaaagtgtttttttcaatgaatctttctcatgtgtgcacatacaccacacacacacacacacacacacacacacactttttatccatgctttcctcatttatttttctcaataaagtgcatgaccaggaaagttctcaatattttccttctttatcttcttgagtatttatttccctacctagaagtagagctccaacccaacaatgcaaaaaaaaattgtctttttttcccactgctgtgtcctcaacacccaaaacagtgactaggtacacagtatatatttgtttaattcataaaataagtaattaatcaataatgaataaagcaattttaagattctcttagtgcttagaatgaaaacttgcaaaatttcttgtgcgtgttaagaattttatactaatcattaaatcgatagaagtatacaatttttgaatagtagagggaaaaataaagacaagctattaagttaaagcaaataatccaaatagaaaactgaggtttaagaacattaattgaattcatcaagggtagtaagaaactatatgaacataggattttgtgttttccgaatatctctagtccaaagccatcactatgtataaaataagatgttaattacagtttaatattcttgtaagtttaagcaaatttaccatttatacgtgatttatacaacatattacctcttgaatattgtctcaaatgactggcttcaagtagcacgttaaataaaaatagtagaataaatgtgtcaagctacacttactattcacaattattttatagttagattatggctctgttagatatacaattttatatttgcttatcttctgaattaatgttacagtaatagactacagtcatcatgcaatgtgttgtcaaatatattaataaacataagaaaaaacatagtaatatactgtgtcaaatttttctatcaagtggaaatttagcacattcttcaggaaatattgactgcaaaatctatgattaatatatttttcagaaatattggatataaatacaaaatgaagtgatgaattattgatatgtgcagttttactatcatataatgttactgataaaattaaaaaaatataactcatttttagcatcagatgaggaaacttggttcactaaagttagtattatctttatttgaatgctacaaccttgaaaaattattacatttgatagaactatttgggaacagtttgttacttctcattgtgactatggacattaatgggatgcccatattccttccattcccttttcttagcatagtggaaatgattacagatatcagttatgtttcttgactgatgttacagtcattccgcattatgaagtatgcaagactaaatttttacaaagggtatctcttatccttatgatagcctaaaaaggtgaaaatttgtcaagcaggtttcctaagatcctataaaattaggggacagggttccagcatcaagatgtagttttacttattgaattaacacagagttttgttgatgattttctttgatgatgggggtagtgatcgtggtattgttttattacattggtttcttcctttttttgttcatttttaatgggaacctcccaataatggtgaggatgcagttaaatggtaactccatacacttagtgtgagtctagaaataaattcaagttttattttgaatacactgaattggtatttctttcattgaataaacatttatctagtgcctcctaagtgccagacaacacaaaacgtaaaataccattggcaaatccatagcaatcatacaaaagacgtgatatttgataaatataactcatacaatgaagaaaaaaaagaacaagaatttatacacagcaatttgacctccgtttgcaacacaacaatataaagtgtaattttctccaatctaaatttgctttgaaaatatggaacaccagctggaagggagctcagatggcttctgcagtggggttggaaatatccttctgagcatgtccagaacaactggttaaaaataattaaatcacttgcaccatctgtgaatcattctgattcttcaatgattacttaagactctcattgtatggaacatattctgagaacagatgaataaaatctattcaagtgtatattgttttccactttgattttcacaaaataaaaggattataatattttcaagttggtaagttatctgataattctcctgccctcctttatgatccagttgcttttgaaataattaaggtttgtttaaaatttagttttatgaataatacaaattcacatagccttgatgttataacataattttgcttaaaaacattctatcatttttaccctttatttaatcttttgagtatagtttagcacccatttagtaacagccaagagaactaaatggaagtccgaattgattgcattctcaaatttagcaccatatgctataatcatgagcagtttttaaaattcctaaatagctattttaacgcatgtaaaacagaggaaagctatatttagtggtgactaatccatggatgaaagatgcatggattaaatataatccaagtgcccatatctgtacaaacttaagatgttcagataatttggaggcattgttaactgtttttctggatatcagtgcatgggcacttctcgccagaataaattaactggggaaagttccagaaggtccataattttccataataattagtgctttcttagttaatagactatctgggtgatgaaaaataaatgaattacctaacaaatacagttatctataacatataactccatctgtgacccgtataaagctcaaaatgtgttaactggttagtatctagacaatcataaacacacatgaaacatgaataatatcggtcactatattttcatttcttgcttcgtagatacactcgagtatttcatatgtggaaaattaagagatctagtcctcttcatatattggcctccctaatgggaaagggtctctttaatctgctacaaagccctcctcttctttaaacttgccaagatgtcttctacctcaggtcattgcaattatgtttcctttgacttgggcctctatttctggatatttccttgctggtctcccgtcacattgcaggatgcagagtgaacattatctccacaggtggcctgccttcgacaacctattttatgtcgttcgccacatccattctatccttaccatcatgctctagaacatcagctagacgtttcccttctaatatttactgcaatctgcaaatgttacctttgcatgtttacttgtttataatttgtctgctatcattagaatgtaggcttgatgaagtcaggagcctattctatcttgttagtcactgtttccccaagacatagagtctatcacagagcaggtatttaatgaaagtatgtggaatgaatgattgaatgaatgaatgtataacatcttcctgtggaaatccctgcagtttcagagttggttgttctgtatttttatgtcagtggtatcctaatgccagtctgccatggtccagaagttttcaatggtccataaggaaaagaaaaaaaagagcaattttttatttagcttttcataaagcaaagttttttaatgcaagaattgtcctttctttcaaaattatgggtttcaacagttttggaggtattaaaatggcctttctttttctttcttctcattttgttacaatgtcctttactagaaaaagtaaagggcagaacttttgtgatgttccctaatagttttttttttttgtaatgttgttattgacctatgaaatacaatgtccgtaaaccaccaacttagataaatttatttacatgaaggaataccattcctgctaagtttctatattggttgcttgaagtttcagaatgaggaagagaaagcatgaaaaccatcacctcctatatgtatggcctgttcggcaagcagtactggccccataacagttatccactggaataacattcttgaatttattttgtcacatgtgaggagcaaaaacaagacaaaatacacaaaaaagagtagaattagggtatcacgacatttgtctaacattgttcaacgttaacacttacaaataataaaggtaccaaaatggtattttcttgtgtataaatattttcatcctctggatttgaatctgtttttgtttgttttggtgatataaagaactcataatagtatcatttcctgatgatatttggaatccaaaaattaattcaaaacagaagtattacattttctgtccttttcataattgtaaacaatgcatcaagatcaaaaacttaacaaaatgcgttaatgttattatgcatgcttttttcacattctttatttcccagtgatcataatgactaataattaacataattatttgtgattgacaaaagactctaacgttcatcattttagttaattattatttaagaaataattggtctggatataatataagccaattaaatttgtattctgaaaagttttgagaagtgaaaaaaaatttattttttatttggtaaaatactttatttctgttgtagctgcttttacaaggagattgtggggaggaacagtcatatccaagttctcagttaattaccttttcaaaatatatgatctaaaatggagtgaaaattgattgtgtcaatatgagtttttagagttaaaacttgtaaattttctggacagaatagaacaattttatattggaatccttgccataggataatacaatgactattatttcctggaacattgacagagaacaagctattttaggagaaactatctggattgtaaagtagagcacattaagcctaaggtgtcattaaattcacaaaacttttaaaaaagaattgagcgtaatctttggtaagagaaaaatggttttcttcagtgactattaccatattttgcaaagttataacctggcaaaatatattattttgggaaaataatattaaatataaccatttctatacacacagtggcactttatttattcagaggtcagatggatatcattttaatttacctgcaacacagccaagagtcaggaatggagtagaacaaaaggcctctcgattcccaaaattgattttttaaggttcatgaaatccaaagcttacttatatttcattatgaaatgaatttccaaatccttttttggagattttttaaaaattttgctttgattaaagaggtaattctaataaacttaattatctctttttttttttgtgcccctagtagctttgaagtcaaaatgggacagaaggaataaatgactgaaacaggagataatagctgcagcctcgagtaaggtgaaaaagaacctatatatatggactcatagtttggggaaataatttagcacagggcaacacagatgagagagggagggatggaggaagggagacagagagagagaacagataattagtgtttatttcattttatacttatggataatttaattatttcaatagtttattcatatagttaggtaaatactttttttttttttttgagacagattctcaccctgtcacccaggctggagtgcagtggcatgatctcggctcactgcaccctctgtctcccaggttcaagtgattctcctgcctcaacctccagagttgctgggattacaggcaaccgccatcacgcctggctaatttttttatttttttagtacagacagggtttcaccatgttgtccaggcttgtcttgaactcctgacctcaaatgatctgcctgcctcggcctcccaaagtgctgggattactggtgtgagccatggcgcccagcccaaggatctttaatatcttacctatgtgcaaaagtgtttaatacataatgccatatggcatattagcttcctaaatcacataccactgccaccagctaacttatatctctatatttacatctgaggctgcataggcacacataaatgtattcatatatgttacacatatgcttatttatgtagctatgctatatgttatttgctatttacatctattaagttacttagcaaaatatgtcctttggctttgaaaaaaatgcctgctgaactcatcaagattatgatttttgtaggttattctccatcttttagtcgagttcctaaagttgtgtttttttaactgcctgctttttattgcaggtatatgaaattgttgtgcatatttcaaagaagaatagaatgcagggtaactctcaaacttgttatttggaattaggtcagataattttgtaaatactgttatcagtatatcacaatgtcattagtgtcccttcaagttaagggcatggaaataaagatggtctaatgtgccaggccaaagaggaaaacttttcagcttagcaaagtgacttcaaatacatggggagaattgaagcagtcatttcaaatgcaaacaaaaagttgtatttttatggattacaatatccttagctaaatgtttactttggcttgggtatttttctcattagtgatacttatttaattagttgcttataaattgaacctgggaagtgtagtttgcagtgagccgagatcaagccactgcactccagcctgggcaacagagcgagactccgtctcaaaaaaaaaaaaaaaaaaaattgagtacttaagatcaattaaaatatatcgagtattggatgctgtcacataagagtgctattagccattggctgttaaatttcctcatctccaggaatctcaggcacctaaaaataattctctttacttcatgggcaacagcagccactagtctttgccacgactcttctgtcaattgggtatgcagtgaggggcaccaatatggttttaggtgatgatgtgaaattgtttcaaaatgctttcattctcccttctgaattttgtcttagtctatgcttccataatattgggagccaattagtagtacatgccttcctgcagcttgaatagaagtgaagtctattatgaacaataaagtcaattagagggggccatgcctactgataaatatgttatgtaaagactcaatttaccttgaaatctgtatctatttgcatctactctttagtgctagttcagagctctgtgcgattattttaaatgtattgcagtattactttaatcaattaatacaaaggtagattaaggaaactttactactcttcatttcttcattctgctgattcctccctcactgaagcaaaaaaaaagtctacaatttagtctttaaaaagtctatagtttagtcttagatatctctttgtactatattccatatactgttcattcttaccaatgaatagtatatatagatatattttacttttttaaaaaatactgctttattctgtgtattattttaaatataacagtcaattagaaacatgttcccaggtaatgtatatagatcttatacattctttgtgaaagtcttagatgatgaatcaaaatgtattctattattcttctacatttctggattattatattttgattagaaaaggtggcctatcaaatctttctttttgatgcttttaaaagtttcctctctatgtaatttttgatgtcccaagtaaataggagaatatgctttttccagtgtgcacaaaatacggattaaatttagcttgtcggttttaaaccacctctattcttgttttttatttgtattttttgtctattttaatctaacaaattacagaagagttgtatgtaaggtaccaactacagctatgattttatcatgttctccttttatttctagtaatttttaccttatgtagaatgcacccaattgtttggggcatagcaattaatgactactgtgctttgggaagaagtgtgatttttgtcattacaatggttctctgagacccatttagtgcttttcggtcttgaactatacttcatttgatgctattattttgactttcactttttaaaaaatggttttctaaatcaccattaacgcagcattgtgaccttgtatttttatgtttcttgtgactttcactttttaaaaaatggttttctaaatcaccattaacgcagcattgtgaccttgtatttttatgtttcttgtaaacagcctatagatggagtgtgcattttaaactagataattttgtctttttaacttatgcaaatatttttacatctttatagggtacatgtaatattttgctacatgcatagaatgtataatgattaagtcaggatagttagggtatccatcatctcaagtatttatcatttatatgtgttggaaatagttcaactcctctcttctaggtattttgagagatacaatatattgttgattatagtcaccctactcttctttcaaacattagcacttactctttctatgcaactgtatgtccgtacccagtaaccaatctctcttcacccattccgcccacctacactcttcccagcctctggtatctataaaaaaaaatcacatattcttaccaatacgtgcttgatcttatgaagatataaaaatgatagatagttcatctttagatgagacattttaaccaacttcatttttacaataactcttataactgtgtctgttttaattccttgtcatattgatggtcattattttatcattttatttactcttatcccttgtctataattttataattcatcatcttcttcactgcactctactgcatctcttcccgcacttataggttatttataagttatactttgtactatcattttactagtgctgtttcccattttaaacaacaattttatgcctatatttctgtagtgttgcgccaaaattaaataagaacaatgccctcatcaccaagatgatttacttagtcaactcctcattattttcaatcaaaggcaaaatcctttaaaaagaaataatttataattttatttcctggctactattgttttcacttgtagtatcacatactagttcaagatgtcatgttattacttaaattacactatcacttcataaaatttgaccacaaacgacacaaggtgtatttcctgtcactgtttttttgtaccgtttatttctcattgttttgaaatctttattacacagtcatccttcagtgtctgtggggcactggtttcagcattttgatatcaaaattcaagaatactcaaattatttatataaaatggcatagtgtttgcatgtaactatggacaccctcctgaacacttcatatcatctctagattatttatagtacccaatacaatgtaaatgctatgtaaatagttgttatgcagtattgtttagggaataatggcaataaaaatgtctgtacatgttcagtgcagacacagccatccatgtatttttgcaaatgtgttcgatcgatgactggttaaatccacaaatgtggaacccatggatacagagggccaactgtacttcagttttaatttggttggaacacatgagaaatgtcctcgtaaaaacataaaggatgtaaactttgtaaaccttgcattttcgaaatgatctttgctttgcagtcatcatgatggatttattggatagtaacattctttaatatctctcctctttttttagtagtctctgtaggttatgaacaattgtcttccagtttccattgttttcttgtttcaactatcttcaagctactattgtttccagtgtaaagtctgattctagtccaagtatcatttatttgtatttaaccttttttctttctctcaaactctaaagttgctgtctgtcccatctattgaagtacagaaatttcattaagatataattttaaatgtttctaaatgtgtccctgtttattattttattttattttattttgtttttatttttgagacagggtcttgctattgcccaagctggagtgccgcgatgcaatcatagctcactgcagccaccaactcctaggctcaggagatcctattgcctcagcctctttagtggctgggactacaggccatcagtaccatgactggctaatttttaaaacatttgtttgtagagatgatgtgtcattatgttgcccaggctggtcttgaactcctggaatcaagtaatcttctcacctcagcctcctaaagtgctgggatttcagttgtgacccaccacttatttaattcttttttgcacttgggtaacgttttaaataaccaattaatattaataacttctttagctctggaaaattttctattatgattgttttaattattacaaatcttccatctcttcttttttctcattctggtacttatcattgcttaataggtatcttagatctgttctctaagtctcttattttttcactattaatgtcagtttatttctatttgtctttaaattgtgatatacttcttctggttgactgtaaagaacccatattttatttttagccatgatcattctcttttctaagttgtctattgttatttaaaaactaggtaacaggctttctgtgctctaatgttaaccttttaatgtttctaattttatttttattaaatgtaccttccgtatcttctagtatactacttgtatggactctcagctttgtctttctctccagccccttgtgtcttctgaaaaagcctttgctttattttctctcatgcctaagtcaaagaatgtaaaatgtcttggcgcaaatgcagttaaggttttgatattttgatgcatagtgattgattgagaagcaacatggatactggaagttttgttgttgttgttgttgttttgatctgatgaataattatttaacaagctgaaacctattcacaaaatttacatatgggaaaacatctctgatctcatggacaaggggtggaagtaaggctgtcctcaaccatgtagtacagccactctccagtaatgcctgcatgaaacaaactagcaggtactgacccccttcttaagtcaaacagatctccttaaatcaatggtctccaacagatcattccacatatatacttgaaaaccatcagatccatcatttctgtctcagatcgtgccaagatacacataactttgaaatatcaccagttcatcatcattctctcttcacctgcaatttttttttccataatttgaggtcctgatacatatattcttctaaattgtagcagttagttgtgattatcttgacgttgcatggactcagttcaaagtgaaacagaaaacatatctacgatgtgatttacccattctcaacatttctattttgtgtgtctgtatttgcacagacacgtacatacatacatgtgcatatatataattaataagctttgaccatataaataatgcaaattatgtataattcacaataataggtttttaaattaattatcttcagagttgagtgagattacttacagatttaggctgtgtctacctgaaaacaaaatacagtgtattagcaattcagtaaaatcaattggatatagaataataacaaattagttgagttttcaccttgtgacattttagtttggatttagtagcctgtctaaattacctttgtgaaaaaactaggctacaagtattttctgatagatataataccagcattagaattattcatataatcttagttttcacattatttaaaatagaacacattgttatattttaataagcaatttgaaaaagaaacaaatctttctttcttgtatgattgccattataaaagaatattaattgagtgctcattaggtaactttaaccacattaagtactagacagccctttggacagagactgagtagaataaaaaacgattacagaacatactttggtattaaccttttctataaataaaatgtattgtcattctctagattagcactgtcctatagaactttctgagatgatggcaatgttctatatctacactgtccaataaagtagctattgaggctactgagaacttaaaacatggctagtaaaaacagatgtactaagtttttaattgtatttgcttttaaataatttagatttacatttctttcgtcaagtgtagctaatgactaccatacgggatagtgtaattatatgcatctttactatcactcgcatttctaatgaagagaatacttccttgaaaaacataattatgacacatgcatatttagacatagatactgagttgccgcattaatctagagatagtgtccacattttctgaggggtgtgacaaatgtaatatagaaataaaagtgtgagtttattctgaaaaatctactcaagttgacagatccacaaggcaacagaagttaaaagcgatataggagggtgaaatataactgcagtatttaaggtctttccatacttattttttcttgtgttacttttattttcacactgaattaagtataagtatgtgtgtgaggtggagggagggttcgatttgcttgtcaacatacaaaaagattgctatagcaagtattcccaagctgaaattttggaatagcttaaaataaaaaatatatactagatatgtaaacgaaaacttttatgagaagagtttgggaagagttatcaaaggttaaaatgattttttgaatacaagtcttctcatacccttcaatttgctaatagacattatgatacccatgaagaagctaaaatcagtatatcttaatatcgtctatatgtcattacctcaaataattgcttatgtttgtattcaagtataatgagtcagattagtaactaaaagacaatttaaggacctaagcacgcatgtacaatagcatgtagctaatgtgctatgaattgaagaaatgcgacatagtgaaatcagatataccttttaaatctatgacaataaagattgcattataaaatgaagaaaatattcctgtttgaattctgaatattcctaaatataaattataaatgtaaatcccagcaattgtaaccacatatctatcttataattatcctgttaagttgatacttgttttttcattaatttatccaacaaatatttttgataacatactgtatgctaggtactaggcatgagtctttgctgcatttattttttgctgccttataagttggctagggtgtataaccttatctattaatttataggttattttttggagatggttttacaaagcaggccatgattgttggtgcttatatattgctgcttatgtgttgatacttatcttggtggcaaccaaagcccttttctttctcttctctcacaggccatacttagtgactaaaattttatcaagttactaatttatgttaattctttgaaaatctgtataaaaatgcaaatgttgtcctttgaaacgaaagactttaaaccactataagccattaacacattttccagattcagtttatcagcttaatttgatagtaattgagcttggccctgaggaattaggtaaatttcatggtgtagaaagtcagaatccacatgaggcaggtcaatgagcaggtctgtccagaccttttacataggacactatttatacctggccttctagaagcagggtgtatttaaagactggcaaatccagcatcatctgcatatctttttcgctgacagcctgccctgctttaaaaattaattctaactttagaaaataaataatatgggcataaaggatgattttctttcatattttaccttgactattttgtgtatgttagtgagttttattctttttaaacaaagggggtaaattgttcattgattctgaataattattctgagatggacaggccctttttttggttacatagcttcacataagcaattttttagatgatgcaataggaagggggaaatcacataagagcaaacactctctcattgctattttttctatgcacggtcataaccaatatgcttagactcattagattgattattcaacatctttctacccagtgacttgactaaaacagacaaaacgaagtactgtcagaatgctgttattgtcatgccattatatgtatccaaaacagtgacaacgcagattaaaaccatacccgtctcacctgcatcatgttgttttgtttttatgctttattgtttggggttttttaatcaccctggaccaatacaatatttttgcctaatttgtttgtgatttgcatttttatgcttacaatgcctattataattgtccaggagaaataaataaaaaatctctcaactttgtttattactgtaatgattcctagaaggaaacttgtctttctctgaagacttgtggggctaagagacagagctacttgtctaagacttaagtctttcccattgccttttcatttatgacccatcagaacctacttaaagcctgcagtcctattttggatttacatatcattgtgttattacttttaaataatccataatatttaagaatgtccctttgaggaaagataatcagatacaaactgacatactttcatattatggctcatagattttcatattatagctcacactaaatcattaataaatcttactttgaggatttgcttattttcatcttcattaacaccaacgcagttaaaaaaaaaaaggctccatcactattttactgtttttggtcaagataatagtctatttttgttacacttttgatgcattgatatatttttcatgtgccatatttatatgagatatatagttattttgtggcatatgtcataatcatatgtcatatagcacatttttcttcttgagtttctttgacctcataactcataaatgggccagtaacctcaatgcatttaaaggagaaagaagtcttttaaatcatggaggaaaacattttgtttaaaaacctagacataatgcaccatttgtttcaaaacaggattgcttttatcctttgcagttatggcccttcaagaaacaaattttatgtaatgaaaagaatgtgataacttaagtttcagatgaatgaaaatgtattcaaaactttgtgagtgatacctgtgcctatttacacagctcagaatcttaaaactgttttgactttaagtttagatcatacaaatcataattgtgttctataatagtcattaagcattgatcgaacttttcatttttaaataaaaataggcattttatggtttctttcacatatctttttgtttctagaaaatgaggctagtatattctttggggtatatatggttaaaaatgaaaataaacacaaagaaataaaatgaattaatcagattatagcatttccttgctaatgatgcatgagtatctataatgatataaggtggtaaagaacattaacaaaagcaagttgattttcaaaaggttagacgggatttgtacacatcagaactcagaaggataaaattattcaaggcagagttaatgaaattcaaatgaaaaggattaatctgaatgagtacctggattttgcataaagaagagaaaatgaacatgatatttctaattacactgatttttaaataactgtctgaaatttttattaaaccaaactgaaagtcattcaatggatgtagttttctcattatagattcgcatgactgtgtcaataggaatgctatacttttaaggaatagatagcaaactagatctccaaatgtctggttctcttttgattcaatttctggtagtttcttgtatatgaaaattacaaaaaagtctatatattaaacattattgtatatatcagattgctataataaatgagaatattcaaacttaataacacggaattttctagaaaatgagttcacagtttcccagtggtgtcaaaaagttattttggaatatttctatttctcaagaaagttcacaggatcaacccttagttttctctagtcagctgatctgtaccacttagtgtctgttatctgtgatgactggacactacgtatcaagatagtaaatctttcaatagatccgtcttcattaaatatatttaaagtataacattaaccttttagactttataacgtatagctgaactgttgcccataggtaattgtaatgagaagcatcttagaaattacaggtattctaatttatctttataatggaaagaaaaatttttgaaagattacttaattatcagtagttgaggatagaaatgatttttctcattcagatttttctaaagtaataaactatacctttttattgattatgttcaaccataagaattttaatatttctaagtgttctagaaaatgtgttcatgccatggctgagcatgtagggattatttccatgtattgacactggttgctctatggcttatttgtgacaatcttgaaaataatcacaatatgcatattattagagcattctcaacctgcagttcaatggctaatatttcttttaagagtatttcgatcaggttaataagagcttcttcattatttaaaagtttgtaaaaaatgatttctagaaccagatacagaattacaattatttgtcacttaggtatctaaaattttcttaaaaattgaactcttgtacagagagtaaaaggatgattaccagaaaaattggcaatttaaatagatgccacataacactcttctaaaagagattttctttgaaagataggtgaaaatggtttttagtttaatgttctgaagaatatttgttaaatcggtatataataatctatggtagacacatggggtcaggtggagagaagcttaacagatgagaagccagggtatggtgtgctgcctacattctttaagccctggtttaggactatgattaacactggatcttatttgctgagacacagaattctggtctgagagcacgaattattattttctaagtgaatctaatttttattttatccagtgtcactgaatgattttttctttttttttttaattatacttaagttctgggatacatgtacagaacgtgcaggtttgttgcataggtatacatgttccgtggtggtttgctgcacccatcaacctgtcatctacattaggtatttctcctaatgctatccctccccttgccccccacccgccaacaggcccctgcggccatatgttttcattgttcaactcccattatcagtgagaacatgcagtgtttggttttctgttcctgtgttagtttgctgagaatgacggtttctagtttcatccatgttcctgcaaaggacacgaactcattcttttttatggctgcatagtgtcccatggtgtatatgtgtcaattttctttatccagtctatcactggtgggcatttgggttggttgcaattctttgctattgtgaacagtgctgcaataaacatacgtgtgcatgtgtctttatagtaggatgatttataatcctttgggtatatatccagtaatgggattgctgggtcaaatggtatttctggttctagatccttgaggaatctgcacactgtcttccacaatggtggaactaatttacactcccaccaacagtgtaaaagagttcctatttctccacatcttctccagcatcagttgtttcctgactttttaatgatcgccattctaactggtgtgagatgctatctcgttgtggttttgacttgcatttctctaatgaccagtgatgatgaggtttttttcttatgtttgttggccgcgtaaatgtcttcttttgcgaagtgtctgttcatatcctttgcccactttctgatggggtcttttttttcttgtaaatttgtttaagttccttatagattctggataatagccctttgtcagatggatagattgcaaaagttttctctcattctgtaggttgcctgttgactctcatgatagggtcttttgctgtgctcttcagtttaattagatcccatttgtcaattttggcttttgttgctgttgcttttggtgttttagtcatgaagtctttgcccatgcctgtatcctgaatggtattgcctaggttttcttctagagtttttatggtttcaggtcttaggtttaagtctttaatccatcatgagttaatttttgtataaggtgtaagaaaggggtctagtttccgttttctgcatatggccagccagttttcccgacaccatttattaaatagggaatcttttccacattgcttgtttttgtcaggtttgtcaaagatcagatggttgtagatgtgtggtgatatttctgaggcctctgttctgttccgttggtctatatatctgttttgctatcagtataatctgttttggttactgtagcattatagtatagtttgaagtcaggtagcgtgatgcctccagctttgttattcttgcttaggattttcttggctatatgggcccttttttggttccatatgaaatgtaaagtagtttgttctaattctgtgaagaaagtcaatggtagcttgatgggagtagcattgaatctataaattactttgggcgctatggccattttcatgttattgattcttcctttccataagcatggaatgtttttccatttgtttgggtcctctcttatttccttgagcagtggtttgtagttctccttgaagaggcccttcacatcccttgcaagttgtattcctaggtattttattctctttgtagcaatttttaatgggagttctctcattatttggctctctgtctgttattggtttataggaatgcttgtgatttttgcacgttgattttgtatcctgagactttgctgaagttgcttatcagcttaaagagtttttgggctgagacgatggggttttctaaatatacaatcatgtcatctgcaaacagagataatttgacttcctctcttcctatttgaatatctttctttctttctcttgcctgattgccctggccaggacttccaatactatgttgaataggagtggtgagagagggcatccttgtcttgtgccagttttcaaagggaatgcttctagcttttgcccattcagtatgatactggctgtgggtttgtcataaatagctcttaatattttgagatttgtcccatcaataactagtttattgagtgtttttaacatgaaagggtgttgaatttatccaagaccttttctgcatctattgagataatcatgtggtttttttggtcattggttctgtttatgtgatgggttacatttattgatttgcgtatgttgaaccagctttgcatcccagggatgaagcctacttgattgtgatggatatgctttttaatgtgctactggatttggtttgccagtattttattgaggattttcttttttgttgtgtctttgccaggttttggtatcaggatgctgctggcctcataaaaagagttagggaagaatttattttcttttgtattgcttggaatagttttagagggaatggtaccagctcctctttgtatctctggtagaattcagctgtgaatccgtctggtcctgggcttttttttttttttttttttttggttcgtaggctattactgcctcaatttcagaacttgttattggtctattcagggattcaacttcttcctggtttagtcttgggagggtgtatgtgtccaggaatttatccattttttctagattttctagtttatttgcgtagaggtgttgatagtattctctgatggtagtttgtatttctgtgggatcggtggtgatatcccctttatcattttttattgtgcctctttgattcttttctcttttcttctttattagtctggctagtggtctatctattttgttaatcttttcaaaagaccagctcctggattcattggcaaatctcatttttatttaacgttcctttctgcaaataccaaaatagtcaaaatttgggtttgaaatttcatttaaggaagttaaatacaagttagcagacaaaagtgagtatattttgagtgtctttttcttcattatatttgaccatacagctaagtttcttgctggctataatccacaattactatatttattaagcaccaatatgaatttaagatagctgagagcatctcaaatgaaagtaatgaagactgagaaaactacatatcaaagaagaatcagaaaatagataaaaacatcttagaattatttttcttttaagaaaaagtgatgaggacatgcatcaaaacttttctgaattcccactgcttttgttaaggccacccagatttttttctaaatattttcaagatatgtccaattctgaaacaactcccttgattaaacaacaaaacaaattaataaataaatgaaaaactacaacttgtcttctacttactctgttcctgataacaaaaacctttgttttccaaaaacttacaggtgtaaaatgtatcattaaaggcagatttaattgcaccattaaataagtattataagaaatacgcttgctttagatgatgtgaagctatctttactgcaggggttatagcaactaacgtgaataagaaagacgagcttattaacttgtaaattttattaagaacaacataatggtcaccaaccaatgtaatgcgtgcaaaacacaagcttgtgttacttgtgctattgattctactgtttaatgtgtcagtgaaaatttcacattcaaatagcctgctgagttatttttcttttaaatgtgtaaaatgcttatgatgaaatagtgaaattaagaatttcttaagaaatctgttaaattctgaattttatttatcaaactctggctcaagtttctaatatccttttaaatgtaaatgagaaatatatatacattattccattgaacatgaaggaatgtgtgccatggatttggcccagatatacacaataaaacaaatgttgtaaaaggtataattatttaatagctaatttgtgcaattctgtgaatttgctatatcacaagtagatgagatatctaaattagaattacttcattttttatatcatgtaagaattgagtatgaaaatcctaggtcagagaaattaaaaacaaaacataaagtgaccagcttgtaaattttactcctctttgtgtggggttcagtctagtatccccaaagtccaatgtattacattactgcaaaaataagtatggtgttgtcataaaaggctgtgcagtaataaatggctacgttagcatgcttatcgtttgtacttccccagagaccctaccactgaaaccctcaggtgacctcatcaacaggcaggtggcagttgatcaattctagacaaagttattgggagaataatttcaattacaagaattttgctgcctatagtgtagacagaagagagcacaggtcatccatctttctgaatttgcctgccaagtagtatttattttttgctcttataaagaatagggaaagatgtattactgggaaactccaaaaggactctggagctggaaattctcatcatgtctagcacttggatcccagtcagaaaagtgtaggtgcaagagaagaggctagtgctcccttatatatcaggacattctggagttctttttaaaatataaattccgcagtcagttctgctcatatagcagcttcattagcagcttaacttagcaagagactagcaacaaaaacaggagctaatgtctagaatttggaggagaagagggcttaatacaaagttacataccagcctaactacttcgtatctgttgtatctcagtgaactttcctatagatacaggaaagttgcctgtgttaggaataaaacagatatgagtccccctcacccaatcccatatctagatttccaggaaaattagaattttaaatgccagttgcaaattagaattagaaatttaaatgccggttgcaaaaatcgtctttttcttaggataaaactactctccttatgacctcatggtctttcgtcttatatttatggtgctaatatgtgtgtgtcacttattatgaaatgcttttaacactttctggaaaaagtaggtatataattaataaatcaccgttttactagacttaccatcgtgaggttttgaatccattttcagcccagtttgtagattcaattgtcagctgtagaatgagacctatataaacttaatggaggaggtttcactgttaggaagctaaaaaaaattgttcttttgtatatctataccagcacactgtccgtgaagaaacgatgatggtgatgactgaagacatgcctttggaaatttcttatgtgccttctacttatttgactgaaatcactcatgtctcacaagccctattagaagtggaacaacttctcaatgctcctgacctctgtgctaaggactttgaagatctctttaagcaagaggagtctctgaaggtaaaaccaaagcactttcattcgtattttacaaggtgatcatactgatcattcatagtgccagaacaattgacttaaattgtatgcatcatgatggcattttgactttcacatggaattcttaaaaatacttgatagtgtggttggcttcagaaatctagggtagaaagacataagttagaaaatgtattttacaatatttagctttgagagacatcctaaaatgaagaaatgcacaaaaatgatcatttttacatgcagtagggacagaaaggaaccaccagtaaataaactttgatggaagaacagtttattcctagttaatggatgacttctgtttcattttccaaaaagggaaattagatttttcatttatatgtaatgtatattgtttttgttttatattttttatgtatacatattcaatttcaaattaatgtcaatacctgtgctataacatatggaataaaattgaatagaaatcaataaaatattttctttataactgccagttaaaggctaccaacaaaatccagctgttttcaaaccaccaacagcaagttactaaattctcaagtaaggcaaataatgatgatgaaataggctatgaatttcagaaggcagtgtctgaagataaatgaatgtaggatcaagaaaatgcacataataatgtgtctccagataattttcatgatcgtacattttacactcaaaatgaaatattatagtatacccagagcttggtattttcaaatgcaaacagtatgtgattataggcaaaagatgggtttgctatcagcagcacatattagctaaagtattttatactcaaatggtttcctggaagctcattctatatcacacatttgcctgtatgaatatacaaatggataaagctatttgtttgttttggaaatcggtgttgcagtatcttcagtgacttgactttaatatcttaacattatatcaaataagctataaaattacacagtaaaataagagcttcacagatctctggaactattccatccatgtcagtgtggcactgtttcttattctgtttgaagtaaaagtcaaatcacttattggtacaatgaagaaaagaaacctaatcagttaataaaataaagctgacatgccagaattcctgtcattatttctattaactaagttctcatggcagcatagtttgtaagtgcatcattgtcattcaataagtaaattattgccaatgagctaatatccattccttcccaggttcatggacatttggttcaggagagtagtgaccctgatcttattaagttgcccattgaataactctgtctccatacctcttagcctggcatactcagaatgttagacccttggctacactcacagtgaatcatttgttcatcctgatctatttaatattattatagctgatgtcaatcgtaatagtattgattactgcggtttataatatggtattattgtagatttaatttagctaaatggttgaatccccataagatacagttgtgggcatgattccttctgtctcccaacaaatctccagcaggtgaatgggcttcctaccttcattgacttttttgaagggggatagttttgagctcagtcttttcagtgaatatgtatttcctgttaaaggcattcatcattgtcattatccagtagtaaaaatggaaaagcagtgcataaattgtacagctgctggttgggaaggtttgaaattgtggttgattttattcctgacagatatgcatgaatcaaattacagaactatagtaagtattgctgtgctttaacatacatcttttttgaaagtgcagtacaacacaaataatatgtaatatgttaaaagaattactttctaaacaaaatacaactaaaatagcacgtatggtttcaatagatgtattgaattggaaagctacctaatcatgttgacagagactatgcagataaacacaaacatatatatatacgtatatatatatacatatgtggaaatctgcatttaatagcaaaaacactagctaaggcagagctagagaagaatgagaaacatacacataagtaatattttctttcttacttcagagccaatattaacagttaattgattgtgattgcttatatgtacaaagttaataatactcataacagacaagagtacataattttagaagaattgcaattttttggaagtttagagcaatattaacttgcatttcatttttaagaaaaaatcattttcatgataaaattttccaaaatataattactgtgttaaaccgtcaaatcctgccttaaagtatctcatatgaaagcatgaacacagaatttcttagcatcgtaagttttaaattaccaaaaggttttctctggagagagttaaatatttgaaagcttatcctaaaagcagaaatgatccacttaaaagacttaactgaaaggatttatcatcatgtgtccatatgcctaattttactgaaagcatcagttttattggaggatgaaacactcttgggatgtcacccatatcatttcctgactcagcatgccttgtactctgactggtagctgccagatccaagtgtctctgactgtttgccttagggctctctctagtaatcaaagctcatgagtgtcaggtagttaaagttctgcatcccccgtgttccccagcaaacctcaaccaataacaaataacttttggtggataaataccactactcactcattcttcagttagggtaactctgaagcatgatttatgctctgacccaaaattctgttccaggattaagaccccatcgcacacagtaaaaacctgcctcataggatacatttcacttgctccctgtcctaccttacacacactttactagcacctccttggatcattcccaaagacatcccttgtcttcgaatctgcttataggggaactctatctaggacatttttgaaataaataatgacatatttactgtgtagttagcatttacgtagagaaattcttagaaatagttcatgcctttggagtggaattcttcaagtgattctgctgctccctcattcagggaatccttagctgttcaattaggccttggtatcaataaatgtgaatttttaggacaaaaataagaacatagcttataataagaatgacaactatgctttaccttttgcaataatgagaatcaatttacagctaatattattctttatggtagagcagaatgtcttcacctgaagaacatgaacaagacaaggatatctgcccacatcccttcaatattccacattgcactggagtttcaaatcactgaaaggaggaggaaggaagggaggaagtaaggaagaaagagagtgagggaaggagggagggagaattgaagaaaagaaataaaataaggagagaaacaaggaggaaataaatggaaggaaagaaaaaatatcaggcacacatcatttcagttgtctcatcaaaaccaattatagtacagatgccttgtttggaatgaataaaatgtgctatactttgggtaaccaagagggtgatgaaaaacgtggccatatgaagaaagctcacgggtaggagacatggtggtcctaatgtagattttaaataggatcaagaaatagagacaacccttgttcaagttcgagaccacaagggaaagctggtagtgagcttataagccaaagatagtgtgaagccaggtcgttcaagtcctcttgagttcaggttttttgcattgctcttgagaaacaaaaaattgttaggacaagtaaacctaaggaatgtggattcgtatattccaaaaatagttattaagctcttagtatgtaccacacactattctaagtgcttataaaacagtgaaaaagactaacgaatctttgccctcattcagcttttattataacattgggagacagaatagaagcaagcaaacaaagaaaaatgataagtaaatattgcgtattactaggtgatacgtattttgggaaaaaaaaaaaaaccagaatctgttaaggggatataggaccactacaggggtagacgtaggtataattgaaagtggcggaattgccatttcaaatagggtagaaatgacctttgagcaaagattggaagaaggtaagggagtcagccatggagtctgtgtagaggaaatagagtagaggcccaaatgtgggactgagcttatcttaatcaagcaccaacaagaaggccaaagtggctgaagcaaaacaagccagtggaagggtagaaagagatgaggatatgggagttgtgagtgtccagattgtggagggcctttggggccattgtaaagaagattctaaatgagatgagagcaattgtaagtttctgagcagttgagtggcatgatctcaatcatgttttaaaaggatcacactggcttctgggttgagagtagaactgtaggggaccaataatagaatcaacaagagttgaaaaagagatgctggtggcttggacttggtcggtagtgagagaatgtcagattctggaaatattttgaaattagagatagcagatatatttctctggtcatacagaaacttaagcatgtgtctatgaaaacccattctcggccgacttggggctgagttagaactttggtctcgtaaaacctagcagaagatcccttgagagatgtatgatttcttctcatattttagtcttcgattcttcagtcttgccttgaagtagggacaaaagtactggcaacagagatttttaatacactggttaagatctttctcctctggaatctgtttcacagctcttaagcacaaatttaataatcccaattagttaaatgaaggcaaaattatgccatgagcaaagtgactgcttttctattctggtattaggagaattagataatagcaagaggcaccatatgtagaaatccaaacaaaatatctgaaggaaaataaaagaacgattgtttatatgcgtattgtaatacaggggcatattacattgtttatatgcatattgtaatacaggggtatttaataatattggaataagaggacattgcaattactctaaataatcatggatcatataaaatttcaaagcaaaatttgtttgcaaatgctttttgaattcgagttgaattttctaatagtttaatagttctaacagtttaatgcgtggaaaagatgatttttattaatacattgtgactttgtagaaactgatcttttgaactatacataaacatttgcaataatgtgatcagtggtttctcttagaaaaattgagtttttcaacacatttatttggttataaatataatttgtttcttcaacagcttatatgacttgggatttatttgattgatttgctatatataaatgtgtgtattttcaaatattaatcattaactgtagtttaaatcatgcttaaattatttccatagtacattatttttcatttgtattatatgaaaagatttgtactatagagaagagattatagatatttactgcctttcagtcatgcccagctcatatttatatgtgcttcggtacagttttcttttatattttatacaaatctctcttgtaggaaattatccattctttatccccaaccattattttatcaagcctagcagttgtcctaccttgactattatgctgcaatttactcccaactctgctaaaatgtactttaagaacgcactcctactccttccattctcccagcagcactgttttcataatccccatcgtgtaaagtgtagaaagcagaaacttccatattaaaacttacaaatcatgaggctggtagaaattttgaagttgcagttaagttgtggggaggttttccttttattcacaaacggttgaagctgtgcttcgaccagttataatgtcgttttttatgtgtgatatataattactgattcgttatttatgcaaagacaatgcatcatcctatgaagaatattttggtccaaatacgtagctgtgtttagaaagtgttttctcacatggggacaataaaccatgaagaaaaaattaaaaggtcaccttaccatagagccaccaaaaataactttttaactttttttggaagctccgtaaaacctagttaataagtactttaatgccttttgattgaacacagttcccaattcgatatgtcattaatgtagtgcctggtagctggatgggatgtgaagagtgtaagaattagatttatatagggtgttgcctttatctgtcagataaagacaaattccagagagtgaaaatgaactggagtttgagtctttggttctcttatttctctttttccattttaagatagatctactccccaacggccgctgtcacaacagttactaatgggtttttctaatccttttttcttagaaatgaaagttatgtgctcctctgttaaccaagttacaaagtgtctcaaggcatttctgatacctaaaactgcttaaagctattattttcaccttcccaaaatatgacgacaatagtgcctagagttttataagtctataaacactatacatgcatttaagtatatgtataacccatgtaactgcagtgctacatttttcaagaaggtgatacatacacacagccaccaggaagaaaaattagtatcttgtttgttgtttttttcctccaccactgtatctagaactcctagaacagcacctagcacttaaaggtactgaatgtacatctgttgaattagtgagtgatggtctgatacatgtaggtgtggactctgagatagaagaagacagggcagtgttagtaagcgctggtactaaaagagaaaaccaaatttacttctttttatattgtatcctaactcactgagttaaatcatctagacatgtgcattctacaaatctatatgcatataagcatgaagaaattgttctaggtttgtatatactgaatctaaaacaatcatttatgaaaatgtgtgacagggaacccacatataattaaaacattactaacatttttccacatcagtgagctttcattatgtggttatgataagcagtagagtagagagtttagcaaagtactgtattggaacctgaaaagcttagaaagatttaacctgattgttgatagttgtacccttgggcaagtaacataagatatttaggcctgttttttaacgttgaaattaaatcagtgataataactgcccctgcctactcaactgtactcttgtgaagatacagtgaaatcatgtacgactgtgtaggaaaattcctgttaaaatgtataattatataaatttcaagatttgtaaaatgcatattgcttcatcaaacatcccaaattctaagaaagttataaatttccacgtaaagtatcctaaaaacaaattacctttaagaatgtgttaaacattataaaattgcatatttatatcttaaaaaactgtaaataaaatgttaaccacataaaatatacgtaaagttatttccagatgtggcaaatattctaaagctaaaaaaactttaaaataagagaatacatacaagctaagccacgtttgcttttgacaaaatcttccttagaggatcttacaaacttttgatcatattcttctattgtacagaatgttccttgacttgtgatggggttatatccagataaacccattgtaagttgagaattttgtatgcggaaatgcattcaatacacttaacccaccaaatatcatggtttagcctagcttaccttaaacatgctctgaacacctatgttaacctacagttgcgcaaagtcatagaacacaagacctattttatagtaaagtgttgaatatctcattcaatttagtgaatactatactgaagtatggtttcgaatgaatgtatatcactttctcaccaccctaaagttgaaaaatcactaagtagaaacattataagacgggggccatgtgtatttccgaggctagttgttacttattcaggagtaatttttttattcttctatttatttaaggtataaaacaaataactcactttattgtatatttatcttgaggtgcagaaatgcaactctaaattattccaagattctgtgtaccataacttttaccaagaagaggatgctgttttctagcttggttttaattgttgttttattttgggctttagtttctttatgaaatgtgttgatttattttttccatttctagttcagtaacttaaaacccattgttctaattgtgagttcagaaccatgacaaaaattattgaaaaatattgaaactctaagcaaagaatgatttaatcagtagtgtttttttctcttttttgctttggagtcttgaaatttgcttttgttgtttattttttgttgtctttcctttgccatttaaaaaagttagtttgtatttattttctcctggttaaatttgtaaccatgaacatattaaaattataatgctattccattgaaccttatgaattgtcaagtctttcaaaaggtttaaatattggcaatatcttatagtttaatacaatgacttgtacccaagtctgcttatttctgaatattaatatatatcattaaacatcctgatggaaaaaaaacaagaactttctgttgtaaatcacgtatgattaacagacaccaattcccaaatttaatttgccaaaccacaggcaaaaattaaatagtgttatcagtaaggaaatctatggagcttccaaaaaggtaaacattgagtagagtgttagcttcctgctcccatatcatgccttttgtttatttcttttctttcttttttttttttttttagatgtatgcatttgggtacagaacaattgtatgaaagagcgattttgcttttctgtcccctgtgtaaaacaatatgatggaaagcacatttccccaacatcagaagtattagttatatataaaacgggcataatattaccaaatatgttttctgttttaccaaaatagtttactgtcatcaatattaatttttgcaggtttgattatattttatcatgtatggtagctacctatgaagttgcttaatcatttatactaaattttcatttatcaaaataataagatgctcatgattgcatatgtaaatagaattaaaaagtataacatgaattttaaaaaagcatattccattcattggtgatcatcagtttttgaggttttcttggattgttgtattgctttggaatttttcctccataaaacctacctggccctcctctgctgagtcacacaacactaaagcgtatcctgactctaagaaatttgggatcatagaatgccatatattttgaactaagagaaaagtacttacttctataaaaccccctttgccatgcatgtgagtcaatttttctatttggattttctgtaaaatgatttaggcgatgtgtacaacttaacacaaaatgtacgtatcataaaaggactggtaaaattgttttcaatttacttagtgctgatggactagaatcattttatctgagaaacacttggatcagtaaagtgcagggttttttttgttgttctttttgttcttgttgatgctctgtggcatctggagaaatgggcaggtgtaattctgaataaaggacttttttcttagatatctaatgtgctgtgaggaaaccataaggaaactcagccaggaaatgcatgtggacttctattccactgttcaacagctaatgtcttgtaaaagtaaagtagaataaacaaggaattacctgaatagctcacgtctgaccatacctgaatatctatctacaatggttgaacagagtaacaaatcttagaggttcaatgattgaattcaaattggattttcataagcaagttcaactcaactttttacttcaagtcaacagatatttattaatgctacaagtgctatgcttaacattctaaaagataagaaagaaatattaaggaataatccttgtactctggtagttgataacattattgaatatacatattatagttatacaaacaagttagagagtaataaagacattaaggacatcatccaagcaaaaatatataagacatgagtgtaactgaaatcatgaaaagaagaaagcagcacaaaaagcagaaactaggaggaattttatagaggaggaatccttagcttgaggtgtgaatataactggaatctggactaatcttgaatgtaatagctgacagttattatttttgtgccaggacacattctaaacacttagagtaacttgtatggtcatcataacagccctacaaggaaggctgtattattatacccatactcagatggagaaacggaggtcctgagcagttaagtgacttgctcaggtgagatcatttttaaatatcatagttgaagtcccactctggatgttcaagctccagagtttctgctcttaagcactacgctatacagtttcttgatgcagaaaatgttttcaaagttaaagatacaaagtcagtaagggtaaaaaaaaaaaaaattgtatcagaaggatgtgtctgaagaataacaaagagattaatccttcactttgttattcactttgattatcctttcaagtgtctctgctggcaaagcactaggaaatcaagttggataaaaactgtgaatccagttttttcttttttttcctggaaaaaaagatgggctaaaagatgggcttgaaagtgtccaaaaagctatatgtcatcatggatggattttggtcagggataatccttaaaatggcaggataaattggacacaaggaaaaataaagagataaaacaataagtaaggagatatttgtgttcagcatagctggaccgatttataaaccatacccttgattcagtagctgtaccaggactctcattattaaagttcactcaggagatgcccaacatcctagatcacccattttcctgtgttagtgcaaaatgtggactggatttcccgatacatatttctatctagttaaataaatactctgattggttaaggaaaggttttctggaaggtgtatataatcccaccatggcaacagaaccaagagtctctgactgtctaccaacctgtagacttgaattttttccctgtactttcttctagcttcttcgatttctgttatccccaaaacaccttgatgtagccttaagcagaatcaaccatcaaagggctaactccctcctcctgctgggtgccttctctgttgggccccagcagcagtgaatctatgctcccaacttgacatttttcttatcccctttcccacctcccctaaataaaattcctttgtgtcaaagtttgatttaagtgatagaaatggctaagattgtctacagggttgggtttggaagaaaagaggtctggaaagggaatatagcaaaacatcagtattttctgagcaagtttggaagagattaaaaattacccctagtgactctcaaatttatatctctagtcaagattcctctcctgaatcatgacatatatatatatgccttttatatattcacttagaagtataataaacatcttaaatttagcatgttaaaatcttacaccctaaccttatcctcctgcagttttctacactatagttaatggcaactccattattccacttgtctgtgccaaaattcttcatgttatccttaaggcctttctctaccaacacacatgtaattggccaccaaatcctaaggattctgcctttacaatgtatccggaattcaaccctgcctccactctgatccaaagcaccatcatctccagcatggatgattgcagttgtctattaacaagtttccccctcattgccttctcccctgtagactctactgtcaatatactagccagagatacctatttaaatggaaagtcagattatatccccctttctgcttctgttcaaaacccccaatgctccccatccccctcaaagtaaacagggaagtccttatgttcataagtaccttcatgggttacccaccccattctctgatatttctctggtagtcgctagctcatacactccagccataatcacttcctccatgttccttggccactcctccaggcacattccagtgtcagggcccttatacttgctttacctgtctggaatattattctcatgatttttctttcaatggttaatttctgcatttccttcagatctttacttaaaaactgccttcctggtaaggtcttccccgacccctcttacctaaaattctgacccccactttatccttcatttcttccttccctgctttagttttgctcctcagcacttaaccactatctaactgagtatatagtttagtcatttctctatttgtttactttattctcctgtagaaggtgagattccagagagcggggcttttgctttctggatcactagtatatacccaagatataatatatgactgtctcaggctgggcgcggtggctcacgcctgtaatcccagcactttgggaggccaaggcgggtgaccacagggtcaggagttcaataccagcctggccaacgtaatggaacccgatctctactaaaaatacaaaaaattagccgggcatggtggcgggcgcctgtaatcccagctactcgggaggctgaggcaggagaattgcttgaacctgggaggtggaggttgcagtgaacagagattgcgccactgcattccagcctgggtgacagagtgagactctgtctccaaaataaataaataaataataaataaataaataaataaataaataaataaataaaatatgactgtctcatggtaggttttttcaacaaatatttcttgagttaatgaatgaatacagcgatgtagctgtcagacacagagagagaaacctagaagatagtattactagttaaaactagtgtggctaggtctgtatgatgaaaactgtgcctaactgtactgaatcctgccaaggagggaaagatgaaatggggaagctattactaagtgagtgaataggaatttccttcaggaaataaatatggttaaaaatgtgaattataagtgcttccagctgtctgctaatgttagtccttcagagaaatgaaaactgagaaaccattagaaagcaattttatcacttcttttaaaaaataaagttcaatatatttcaaaccagaatatcatcgaaatactgaagtcattttcaggggaaaatgccctgaaacaacaatttcatattatcttatattttaacttatgcttttatacatttgaaattttatttcatttgaagacttttttctaattgaaatttttgactgagagaacactcacaacttctgatgtaaaattttattactgaggaaaaactgttaaacagaagacaaattagccaattaatgtttgtatatacatcccacagtggacatattatttaaaatcttggaaagagttgtagatttgtgaaggtatatgtgagcttatttctaggtatgaaataagggagcaaagacacttgtaaattatagacatccttatttagtaattggatgttgaagatgaagaaatggctgaattgaatgaccacagagacgggacagaggaagtgatgtttgtttgtttgtttaattgtttattgagacagagtttcactcttgttgcccaggctggagtgcggtggcacagtctcggctcactgcaacctccgcttcctggggtcaagtgattctcctaccttagcctcccaagtagctgggattacaggcgcccaccgccacacctggtgaatgtttgtatttttagtagagacagggtttcacatgttggtcaggctggtctcgaactcctgtcctaaagtgatccacctacctcggcctcccaaagtgctgggattacaggcgtgagccaccgcgcccggctgctattttaaataatagaactttggcacttttcacagtattcgggaagcaacgagctttgctataggtacaaaaatatatttaaaacttcagtaaattattttaagtttactttcatcaaaagtgattaacagtaagttcaatttgtcagatattactctcccctactctagttctcttcaggttctgcaatatctactttgacatttatacacataagtttaccatttagatggtaaaggcaggctctgcaatgaaaatctttgacagcaagggagtagttgtcactttacattaaatggaagaaaaactaaacagtagaagtctatcccttatgataaagaatggagcatagttaagggttgcttcatacctttatcttaaactgattagttggcaaataggtcccttgtttgtttcctagataaattttctgtattctctggcttctccttttatcctgttaaagacacatactccacaacacttgaataaacaaagcatttttatgttcaaattatttctgtatgtgtctcctttaaaaaccaattatcttcttaagggagagactcacattttaaagtctttattttcatatctcacatttgaggctgatattatgtctgtattatcaataaacacttatttaaacaataagcttttcaaacagataaatgaattgaagccacatggcttatagatttctgcttttccttactttaggtatctggatttcatctgccggttgtaaaagttactgtgctatctaatttttctctattcacagtgcataatcagggtcttctttaacttattggagactgtgaatcagagatgcaaatatcctattttaaaatattaaggactcgagttgtataaattcgtgtacagatgcctttcagaaattaaaattccatttgtatgtatatttagaatttccttttgcagaaagagtggccaaaaataaacatcttacagaatttcagcggaatagtgaagtggtcaattcataggggcatgtcaaaattaagaagggatttgactaaaaagttggtactttatcattttgacatcatattttcagataagataaggaactattcagggagagaaatagaaatgctatattctatagtgattctagggatgtttatatcgccatagcaactacaagggactatggcttcctttttagagggtcagaaactataaagatcacttatttctagacaaactaaaatagtaaaatactatcagagatctcatctctgactttaaactatggaaagtgctacagcattttctttggtgcacataccatttttctgtgtgcagtgccttgaggacacgaatatgtgcagggactttaaaaaggatgtatttcctggactccagccaattttgacagcattctctgagaatgcaccaaggagctattatctagatatccagggagtgtgacatcccctgccccagtttttgctttttgcttttctcctttaagatagaaagttttcccgcgttagtaacatgctgtacagcattgctaaaaccgttcataacttgatgctgagcaatgctacagcattccaaagaattggtagctccccagagactcagattaaaatcaggaagctttgcaagctcaaatcctcagagagtatacatacacacacatacgcacaaacacacgcataccatatcaaagccataactggataacttttatatgctgatggggaagatcctttatctcttcccttgaatgtttttctccatgggtgcttacagctatgcatttaaagggtttgggcctgctatgtactaacaaatgtgattggttgcccaatgtgaatttaagtaatcagcctttcattcagctggagtcttggtatcaggtggaggacttggcagagttatgtatctttgccattggactggcagccaagcaagaatgatggagacagtgacttaaaagaattcagagttgaatcaagtacttgtgaaatcaggctgcccaggtcaggcaagttaacagaagcagccaagaagatatgttggtgcacgtttctggtacctgacctaatcaggctagcggagtagccctaaacattccacccaagactccaggcttggagccatcagaagatggtagtaaaattctaccaggtaaataaaagtaaagaaataatactagagatacgcttgagttcaatggcttttagggcattaataacaggtattacatccattgtatctcttttattataatttcaagtgtattttagattcaggaatacatgtgcaggtttgttacatggatatattgtttgatgctgagatttgggatatgaatgaccccatcacccaggcagtgagcatagtatccaacagtttctgttttattatgagttttgtttttatcaatatgaaacttttcttcaataagcaagcctctgatgtcaaatacagcatactgcaatgtcgtacaaagctattttctattttatagtgaaagatgatgacagcaaaagacagtctggtctgcctacatttatgttttccacttccaacatgctgttgttgctctcgataagatcaccaatgacctcctaaattgcccgagctgacttttccctcctggtcctggctgcatctgacttgttgacaactccctccctccttctggttctcttcctgggtctgatgactattattctttagggatactcatctccttcctctgcccatgctttccacataggttcatctttatgctacctttcttctcactcttttcaccctaaacacctttcctgagcaatctgaccatccctagtcttattcaacatcacacacattccaatgactatcaattctctatgtgaaattgctaaaagacagttttaacctgcattcctccagataagtaaattctcagattgtttctgtgttggcttgttctttcttttgtatggtaatacctgacctgtcagataagtactttttccacagagttaaattgaggtgcgaaacaaaagaaataatgaaagctttccatcacaaggtgtacatagactggaagagaatgccttgaaattttattttaaaaacaccttctttctctgaaattcactcacatcacccataaccattgtatcttatcctgttgctgagctgataaataagacacgagaacacagttgctttttataaggttcccattgtaagcattgacttttaccttttacaactgacattatctgtagtctcacctgcctcttcagcttagttcttgctcaaggcaagtcctcgtggaccacaaacgtgaaatcttagaataaggcagaaaatcctctaagttttattgttaacttctttcctgtttccctctctgattgtgaagttttcttcagagcccgtcatctggaaagctgtacgatcagcagcagtcactccctatctaacacagtctccaacttacaaatgattaaaatgcttcccaattttgactgaaaataggcaagaatattccctttgttttgggaggctgaggcgggtggatcacgaggtcaggagatcgagaccatcctggctaacacggtgaaaccccgtctctactaaagatacaaaaaattagccaggcgtggtggtgggcgcctatagtcccagctactcgggaggaggctgaggcaagagaatggtgtaagtaaacccgggaggcggagcttgcagtgagcctagatcagaccactgcactccagcctgggtgacagagctagactccatctcaaaaaaaaaaaaaaaagaatattccctttgttgatatttgttaaaatttatatttatctagtcaggaaacataagatctctggatgagagaatacatcattaattactcaaaagcatctcagggcaagatgtttatctgtgagtgcaggggttgtagtacaggagagaaatcccagaattgtggatcttggagattatatagagcacctgatgtatcaggaggagagaaagtgagagagacagacatacaggaagacagagactttgctctgggctataaaccaatgatctaggtctattatttttggaatataagttgaaatgtaatcaaagggctcttggagataaaagtttttaaatctctccagagcaatgcactaaactccaaggtacgcttgccattcagtcaccctttaagacagttactacaactctttgctcagaaagcctagtccatgtatccaaatgtgaaaatatgtatggctcagcaatccctgccatcttactcctcttctcaaaatctgatttcaactgcctctggaacatctacagtttgatgcctcaaaggcttttcagaatgaccatgtccaaaattgaactgatcacttatgcacacatacacaagcatgtaaccatggaacctcttcatctgtctgaaatcctgttacccaatgacaccacaaatcatgtggatgcccaggccagatacctaagactcattcaagttcttcctcttcttcacccaacacacagtcactgaattctgctgagctgttttcctaaacttccttcccacttcagctcaaatgtgaatagcaactagatacttgattcaattaatgaacttttgttaagactgtaggtgtgttaatggtattatatatgtactttccgaaaaaagttctcatgagagaatatttcagcaagagaaaaatgctgaagtatttatggagaaaataatatatcagtttgtttcagaataatctagttgaagaggtgagtgggtggattgtccatggagtcataacagttggcactggattatagggttatgggagctatttgtattattttcctactttcaaatatatttgaaatcttacataatgataactttttaaaaatcatagttccccattagctactgaagtacaggcagaattttctgttgagattcaaagcacattattgaacatcctcagcctctgtttcatgccccatcttcccctaagcttctatgttactgaaaaggcagccaaatatgactgcgcttgttacctagctttgcgtgtgtgttacctactagctctaatgttcttcccacttctactactcagatatgtctactgcaatttgcaccttcttcgtgaattctttcctgagcctatgaccaaatatatgatacatgttttctctaacttctagaaaatgtttggtaccacttggaacactcatttcttccttcttctcatccagctaaggcttctatacttggatttttttcttcaattcttcaaaccatatcctttcttactactacaataaaacctacttaaaacttcttaaaggcaaactaaactgtgtttcacccacctttgtttctgctatattgctccttacacatgggaagaactcaataaattttgctcagtggaccttatgtataatttagatgatcaaaataacaaaattcgtactaggaagaatagccagaatgtagtttttagcaaatttattgagaataaatatgtttagatttttctttcttcccgtataacccatttgtggtttgtgatttttccgttaaatagaatataaacaaaacattatggattaaatttatgggaccatctattcatttattcaacaaaaaagcttttgccatctatcatgtgccaagcacaggtttgagctttggaagcccaacagataacaacatccctgtagtcatagatttcaaattagtggtatataccggctacttgatatatattttaatgttagtaataagtactataaagaaaagggaagagtaatgccaggaataaagagtgattgctggtgctatttaaaatagagtagtagagaaggcccctttaacgtgagaaagaagtaagggaaccactgatagaaatgtgggttaggaaaactatttttggcaggtagaacagcaagggcagaaatcttgaagcaagaatgtagttgttatactcaagtaatgcaataaacctaatgagggtgaagtgttgtggactatgaagagactgggaagagatgagcttggaatggtaggtagtatacaaccaagtcatgtagagatttataggtcatagtgaagattatgcttttttaaaaaaagtaaaagcaagtttattaagaaagtaaaggaataaagaatggccactccgtaggcagtgcagtggcatgggctgcttgactcaggatacttgtagttatttcttgattatatgctaaacaaggggtggattattcatgagttttctgggaaaaggagtcagcaattcctagaactgagggtttctcccattttagaccatattgggtaacttcttgacattgccatgcatttgtaacctgtcatggcactgctaggagtgtcttttagcctgctaatgcattataattagtgtataatgagcagtgagaaggaccagaggtcacttttttcaccagcttggttttggtgggttttgactagcttatttacagcaacctgctttatcagcaaggtctttgtgacccgtatcttgttctggcctcttatctcatcctgtgactaagaatgcccaacctcctgggaatgcagcccagtaggtctcagccttattttacccagcccctattcaagatggagttgttctagttcgaacgcctctgacatatttcccctctttcttttacaagggaacccttaatcctaagggtagtagagttacccttaggattaagtagtagaagggtaatacatcttctgtaacttcttcaggctgaatatgggtgatgatatttctgcctaactattagggtctcttgtattcagggtagagaggagctcagtcagcaagcatcagcttggtgagggccattcataactgataaatggtgatatctggaagattagtaagttttcaatctaagaaaacattgagtaagcttattctgcattcctatacaaaaagtaaaacagcaaatatattccacaacagtaaaacacaataagtaaaattatcccaagtaaactaaattagaaggctttccgtgaactgggcagctgttggaaccaaagtgatgtggggctgctagctgattccaatacatgcccagaattagaatactgatccaggtttttatattacccatccttcttgtttcttctgaggtgcagtcagagatcactggcaggttcacaggaataagcaggatcagtctatattgcaggaaaaaactcaaaaacagctgacgagactaataacaggtgtaccatagttcttaaaacataatttttttctctctccagtctcccatttttactaaagatggatcatcataggactgatttgctttattatacttggcctgattatttgtataaagtgttgcaagaataattatttttcatgtaggcttttgaaattggctgtgattgaactctgtgatgaagagccaccagaagattttgagcagaggagtgatatgatcccaattatgttttaaaagaatcttttcggctcttgtgtggagaattatccagtaggggggaaagagcggaagcaagaggaccatttagataggtagttctataacccagatgagagacaataatagcttctatcagatctgtagcaagaaaggtagtgagaagcagtcaaattctgcatatgtcctgaaagtcaagccaaaacatttgcccaataatttgaatactggagactgaaaaaattaaggatggctccaaagttgtcaatctgagtaattgttaattgaattactataattcaattgaaatcagtaattgccatttactgaaatgagggaatctatgggatgagaaggattaggaaatgcagttcagaattttgtttgcgtcatattaagtttgaaagtctcgtgagacctccaagtgttgagaaattagcatttgttagactggagttcggaggagatgtccgggcttgagatacacatttgggtgtcattgtcttatataagatatttaaaattatgagaacaaatgggatggattatggacagagaagaaaagaagtgcaaatactgagtcagagcactctaatattaagatcaggatgagaaggatccagcaaaggaaagcagaagaggtcaggatacagaagccaaatgaaggcagttttaagatgtagggagcgatccactctctcaggatgaggtctgtgatttacctattgaatttgaacatgtcaaagtcactggacttcatggttattaactttaaaaagtcaataattaagaattgcaacaccatttgctacctttgggatttgtatatatatatatatttttctctttctatagacagctaattcatttttttactgttttaaaatttttatattacagaatataaaagatagtctacaacaaagctcaggtcggattgacattattcatagcaagaagacagcagcattgcaaagtgcaacgcctgtggaaagggtgaagctacaggaagctctctcccagcttgatttccaatgggaaaaagttaacaaaatgtacaaggaccgacaagggtaggtaacacatatatttttcttgatacttgcagaaatgatttgttttcagggaactgtagaatttatttcagtaccctccatggaaaaaagacagggaaaaagaagtatcactctcattgaaaaatggtaagtaaaatgagaacaaataatgatgaacaattcagacaaatgagctgaactgtagaaattattcagtattaaatttagcgttatgttgaagcattatatcttctaaaatttcaggtaatcgtaaatcagattggggcattgaggtgctataaacagttgttcgatataacatatttatctttagtcaaatctgtatctacaaatttataggagtttgatacttagattaacatgtttaaaatactacctatcaataaaaaaattgattttcatttatttatattttggagggtgacactttacactttgcattaccctcccccacatttttttttgccatggggaatttgttaagttgatttaaaatcatgtttctttttatcttaattgaaatatttagctgttgacttaattggggggtggcagaaattcaattacattatttagcttcacatcacaagaagtggattactctttcttttacatttttagattaaaagtaataaagttctctaacagcttaaagtgattcatttcagaagtctttatcctcaaggtaggcttcttaattattctcagaggaaatcaaatcattcgtctaataattatagggaacctccatggtatctcttacatctgtccatttctaaccatctttactcctattttagttcttggtttactacatcaggcacctaaagagagatttctagcattaatctcagttgtctcaagtgattatctccactttgttctcaacgatctttcagtggccgtcatttttctaaagtgtaagagctttggtactataatctcattcccttgagaatgaaaccctgactccttaattgtgcaaaattatctggtcagcctcactgcttatttcttcgtgcctgccctatagcaagcccctccaattatgttctagcgatattaaatcaatttgcagatgcccaagtgttttgtactccctctgacctgcctgttcttcaggtctcacttcagatgttgtctttttctagaaatcctaaaactattagtcgctcctaacatctggaaacttggatattgtttcatcatttaatgtaatttaatatcaataaatcatttatgcatttgtaaattttccagacttggtggctaccgtgtagaatatatgatctgatgtgcctgctcctaaaacctaacacatagtaatcaatttgtttacttttctgcctcccacacaagctccttatagaaaagggctatgttttatttgtgttatatgctcaggactgatatagtgctgagcacaaagtgggtgttcaatgtgtctggactcaagcctcctctccgaaacctgagaatatttcccctttggatagtctaccagatttatctcactgcaccttccagggcaggtgcggtggctcatgtctgtaatcccagcactttgggagtccaaggcgggcacatcatttgaggtcaggagtccgagaccagcctggccaacatggtgaaaccttgtctccattaaaaatacaaaaatgacctgtgcgtggtggcatgcgcttgtagtcccagctactcgggaggctgaggcaggagaatcccttgaacccaggaggcagaggctgcagtgagcccaaatccaccactgcattccagcctgggtgacagagcaaggctccgtctcaaacaaaacaaaacaaaacaaaaaaacagatttatctcaacttccttgaaaatagctggtcccacagtatccaaagccaggcttgataaaggcaaagaaactcagccactctgtgtatatgctacaaatacaaacttaaacttataaaatggtggctcatgcctgtaatccctgtgctttgggaggctgaggcaggagggtcacttgagcccaggaattcaaggctgccacgagccatgattgtgccactgtactacagcctgagtaacagactctctctaaaataaattaacaaaaatatttgaataaacttatatcgccaccatggtgtactttctcccagcatttcacattgagacattatgaggctctgcgggctactccaatgatgtcagtttcattaccatcttttgggatgttcattccactcttgggaagttcttccccctctggtttgtcttcttatagtcagtgttttctccaagcattctaggccacccacaccatcccctaaggaccgttgaggtttcttggatagccagtgattactgtgcttctatatacacctaccagttttgcactaaagtagaaataacgctttctgctttttgaggtttctcctccgctttactcatgagtaatttttggcaaatgatccaggtattcccttctcactgggtcatatggacatttccctttcagtttaccttcaccttagacttaaacagaaacactaacgccattccacagagagggtcgctgaaatctcaccccaactctgaggacttttctggttttgacaaaggatagagtttctctagccccaatagatccaccctgtccttatccagaggttgaaattgtacttccattgacattctataggaattggtcaggagctgttaaatttcctatgacttttagtacaatctcagatacaaactgttttaagtaattgcttataagcacaggctctagagttccaacccgttttggaattctggcctttctgctatctatgtgcccttgagcaagtctcttaaatcttctgctccatacatttctgatgtataaaataggataagaatagtgtctatgtcacagggttgttatgaggattatctgacacaatatatgtggggagcttagtgggttgcttaaacacgataatggctcagttaaggttggcaattttgatgatgaaaatggtgatcttatggttctgatagtcatgatatctgttaattcattcttacatgctttcaaatttccctgagaactacagagagaagaattagactcagtccctgctttgaagagcttcacagtcttggagagaaaaggcacaaccagccagtaaaataagggttgatagactggagctgtacaagagggcaagaacaagatccctggggaatggaatgaagctatcttactaagaatggggaataagtcaaggtctatagaccattcaaggttctgagttacaactaacagaaagtgactctagttactttaggtagaattatataaattactagaaggatatcagatacctcatggaatcaataggaaagcctgagagctaggtttaacaatgggcagaaactataaaggaagagcaggctaggcatccagaatatatctactatcaagctatgaggtaaatctgaattattttgctgtcatgccagagtccattgctttaccaggagcaccattgcactggacattgcttgctatcgtcactgcaaaaaaaaagtatctaaattatttattcttgctgtgtgtcgctcattctacaactagggtctctggcagaagcatctgatagtcagaggatggatatttttttctgtaaaggggcagttagtcgatatttttgtccctgcaggtcatgtagtctctgtcacaactactcaactctgctgttttagggtgaaaaaaaccatgtataatatataaatggatggacatgttgtgtttaaataaaactttatttaccaaggcagatggcaggctggaattgctgatgggccatagattgatgactgctgttacaatacaggtttaggccacagaactaggttcttattgccagagatcagggaaaataaatagctgaatttgttcttcattgtagtggcagtcaacacctcgtgtcctactaagtcccatacaatggtagattcttgaatccttggagagatttagaagctatgcattcctgaatacacaaatgttcagtacagccttcatgtggtgttctcaacaaaaatctgctgagttttttagtaagccaatttgggttaaatcaaaataaatttgagctagtaagaagggctatattggtatttttcttaaatggtacatgtatggtagtattagctatgaccgcaataatgctgtgacacaaatcaccctagaacttgctgactgaaaacaacaggcatttctggctgtttaggttacttgtaccttgactgactcagctgggcttggccgggaagctctgcttcaagatgtgggttagtagagctaggttccatgatgcatgttggattaaggtctgctatatatgtctttgctctggacctaagatgaagggtcagtgacatgttttcatgaccagtcaccaaagtataaacctaaacctcccaagaacactcatggcctctgctcctgtgaagttcactgacatttgattggccaaagcaaattacgttgccaaatctgacatcaatagaatgagaaagtagactcttcctacagtggaaggggggagagatgttaatatttgctgaaccataattcaaattattagagatagttaataatttataacaggattgttttacagctagaaaatgccttagtggttttgccctgcttcattattttataagggagaaaactatatttcaaagatgttatgtgacttgcctaagcacatactaaatagtacatctgcgtatttctcgttcagtcatctctattaaatgtcataaggtaaaacagacattacgctttagatgagaacaggaagatatttaaaaagccagactaatttatgactgctcattcattatctaacatacctgcttccatacattgtctttcagcaaatagaatttcaacatgtatctcaacaagttacacatcatcaaagtattaaaagccttattttcacggacattctgattgttcactaacagtcaacacagtcaacagtaaatccacaagcaccatgaacgtatggatagatatgcctatatgtaagattactagttaactttttgggaaattaatattactgctaaattcagttttcattgattttcgggtgggtaactaactgcttataaaatatacctataggaaacatgtaaaaacaaagaatttacataagatctatctgggattagagaaacaaagctcttttcttctttcaatgaacacttaagaagggcctactaaatgtcagatgttatactctattgtcgttagtttctttctgataccatctttactatcctgtaagccattagtgagtgtttcccacttttagaaaatgacttcccaaagactaagagggtagaacagttcaaatgctatcatcaaaatgaaggcagtttctagactacaaattgctgtacagccataagatggcattattgtgtaacaacaaggtccctgtcaaacatcaagaaagtaatgttttaaaatcagtatttccttcttggaattctacttagtcagatatgttgggttgacttacccacccatataagtagttaaattcaagatggttctgagctttagatatgatgtaaaatagacatgagactaagagtatttatttctatattattacatttctatagcaaaaaaagaaacctctaaaaaaattagagaaagaagtataagggcatttaattaatcaaatgttcttattaataatatttcataaaataaaggaaatgttgaaaaataaaatatgaacacagtgttgtataaagtaagtcagaaataagagaacacttactgtatgaatctattatatgaaactaaaaaattaggcactttggagtttagaggtcagataggagttacctttgtgagttgtgattaacaagggctgaagcaggcttctagggactgggtaatgttttgtttcttgatgtggatgctgcttgcattgatgtgtttcctttagggaagtttatggaaccatacacttgtgatgtgtacacatttctgtgtgaatgctggactgaactaaaatttatacttacattttaaaaataataaatatgtactttaagtacaggagggacataaatcataattgttttaataaagaaggtgtagctttaggaaaagcataccgcattgttctatttttggcatttcaccatggacccctgaacattttataattgcccagtacagcctgtcagataaatatgtgggcactactgctttagagaaagtattttccaaatttatcaccaccattctggaaccacagttccacaggtcattaggatgctgagggtgggacagttggaagctgcttccccagggatttctccattgttcagttctcatagcagtaagcctgcagcattaaagcactcacaggctctggctgccatttgtgctacatgaagaaaaatgagaaaatgaaagaaacgaaaggagagaaaacaggagtagaaaccaaataaatcagattcgaagagaaagtccctaatcgtctctgtattcagacagtagggaatgagcatgcaattctgcaagcccattcctaatgtgagtttctgataagaatttgctatctcagttgtaatctttctactgagacattcaataaataattttctttcatgtcaaggtaaggaaataacctcacattacccatataaggaaagaatagtatactaatcctcacgttatcactatagaattttatcttttaaagtggaagctagagggacagatgcataatctgggagcttttccagaattgtttgttcctaaatgagacattcagctatagcagcattagcagcctcttctatttgtcacaatgccatatgtagttgggaagatacatgataagcacatacaggatgctgacaactcacgaaggattatcattgcagtcttagaattaatctctaccatatttgaagatttttatgcaagactggatcttcattccacaacccaggtataggtatatgtgccaatacaaaatacttactgttggtttctgagcttggtagaattaggaagtaaggggtaaaaaacaagcaagtcctgaacttaagaaagttgttcatatcctattccatggccactgttttactgactggaagaaaggaatcccgtggattcagtcatggggacaatgcagaagaagatacagtagacagacagagaagtacaaatttctatttatgttccacttttcaaaattttttatctttaaatgttatttttaacgtttgtgggtacatagtgtgtatatatatatatatatatatactgtatatatatatatatatactgtatatataaacacacatatataaatatatactatatataaacatatactatatataaatagatttactatgtatatacacacatacatagtgtatatatgtggggtatatatatatgtggggtacatatatatatgtggggtacatatatatatatgtggggtacatatatatatgggttacacatatatatgtgtatatatgtggggtacatatatatatatggggtacatgagatgttttgatataggcatgcaagtatcatggaaaatgggatgttcatcccctcaagcaattattctttgttttacaaacagtaaaattgtatttttttaattgtttaaaaatgtacaattaaattgttttgactatagtcaccctgttgtgctagcaaatagtaggtggtgttcattctttctaactattttttgtaccaagtaaccatttcaacctccccctcaacccccccactacccttcacagcctctggtaaccatccttccaccctctatctccaagtgttcagttgttttgatttttacctgccacaaataaatgagaacgtgtgatgtttgtctttctgtgcctggcttatttcatttaacacaatgacctccagttccatccatgatgttgcaaatgaaaggatctcattctttttatggctgaatagtactctattacgtatatgtatcacattttctttgtccattcatctcttgatggacgctcaggttgcttccaaatcttggctattatgaacagtgcttcaacaaacgtgggagtacagatatctctttgatatactgatttgctttctttgggatatatacccagcagtgggattgctggatcatatggtagccctgtttttagtttctgaggaacctccaaactattctccattttggttgtactaatttacattcctgccaacagtgtacaggagtccccttttcttcacactctctccagcatttgtaattgcctgtcttttggatatgtcgttttaattggggtgagagaatatcccattgtagttttgctttgtatttctgtgatgattagtgatgctgagcatattttgatacacctgtttgccatttgtatgtcttcttttgagaaatgcctattcgaatcttttgtctattttctgatctaattattagactttttcctatagagttgttttaactccttatatattctggttattaatcccttgtgagatgggtaatttgcaaatattttctccctttctgttggttgtctcttcactttattgattgtttcactgcggaggagctttttaacttgatgtgatccatttgtctatttttgcttttgttgcctgtgcttataggatattactcaagatttgttttacccagacagatatcctggagagtttctccaatgtttccttgtagtagtttcttagtttgaggtcttagattttagtcgttaatccattttgatttgcagttctctgatggccagtgatggtgagcattttttcatgtgttttttggctgcataaatgtcttcttttgagaagtgtctgttcatgtccttcacccactttttgatggggttgtttgtttttttcttgtacgtttgtttgagttcattgtagattctggatattagccctttgtcagatgagtaggttgcgaaaattttctcccattttgtaggttgcctgttcactctgcatcaattttgcatcaatattttttgcatcaattttgcatcaatatttatcacatggtagagttcagcagtgcagccatcgggtcccaagcttttctttactgggagagtttactaaggcttcagttgtgttactcgttactggtccgttcaggttttggatttctttatggtttaatcttggtaggttgtatgtgtctaggaatttatccattacctctagatttttcaatttgttggcatatagttgctcatagtagccactaatgagcctttgaatttatctggtattaattgtaatatctcctttctcatttctgattttacttatttgggtcttctcccttttttcttcattagtctggctcaagatttgtcaattttgtttaccttttcaataaaccaacttttcgttttgttgactttttgtatgttttctttattacaaagtcatttatttctgctctgatctttattatttctttcttccactaattttgggttcgatttgctcctgcttgtctaggtctttaagttgcattgttaggtgatttatttgaagtttttttcttttttgatagaagcacctacagctgtaaatttctctcttagtactagttttgctgtatcccataggttttggtatgtggtttttctttcattttttgaagacatttttcaatttccttcttaatttcttcatagacccagtggtcatttagtagcatattgtttaacttccatgtgtttgtatagcttccaaaattcctcattgttgatttctagtctcattccattgtggtcagagaagatgcttgatattatttcattgttactgaatttttaagactgcttttgtgacctactgtgtggtctatctttgataataatctgtgtgctgagaagaagaatgtgtattctacactcattgaattaaatgtcctgtaaatattagatccatttattctatagtgcagattaagtccaatgttactactttggttgagcttctgtctgggagatctgcccaatgttgaaagtggggttgttgaaggctcctgctgttattgtattgaggtctttctctctcctgagctcgaataatatttgctttatatatctgtactccagtgttgtatatatatttgctttatatatatatactccagtgttgagtgcatatataattgttatatcctgttgctgaattgacccttttgtcattatataatgaccttctttgtctcttcttacagtttttgtcctgatatcgatttggtctgatataagtagagctagtccagctatgtttgggtttccattggcatggaatatctttttccatccctttatttccagtctgtgtgtagctttataggtgaagagtgcttcttgaggtcaacacaaaattgggtcttattttttcatccattcagacactgtatctatttttcttttcttttcttctctctcttttttttctatctttctttcttttcttttctttcttgagacagcatctcactctgttgcccaggctggagtgctgtgacaggatctcagttcgctgcaacctccgcctcctgggttcaagagattcttgtgccttagccccccaagaggctgagattacagtcacccacaatcacgcgtggctaatttttgtatttttagtagagttggggtttcatgatgttggccaggctggtctcgaactcctgacctcaagtgatccacctacttcggcctcccaaagtgctaggattacaggcgtgagccaccatgcctggtcgagacactgtatctctcttgattggagagtgttgtccaggagctgagcctagaaatgggtcctcacaacactgtccagtgccctatcctactgtgactaagctggtatccaagatgcaagacagaatcctctttacttttcactctcctctccttaagcaaaagtaaggagtcacttttgttactgtgggctgcactgcttgaggtgggggaggaatggtgcaagcactcccttagccatgccagctggtgtctccctaggtcacatgccaccctagtcctctagctcttagcccaggctatgactagaagttatctaggaattgcagttcgtgtgtcccagactgcctctcaggtttacctgggactccagagcactttggcccacaatggtgaggcttgccaagaaacttgagttctgactgctgggatgggcgattcccttctggctggggctagttcaaatattccctccgtgcacaggcactgactgaggccagcatggcttttttctctactgtgacagcacagcagttagttcaatgtaaagtcccccagtagctgtactgtcccttccaaaagtgcaaagattccctctctgcactgcacgtccagtgctgggtgattgggaaggtgtggtgttggtgattcaagactgtgtctcctgcctttcctcaatgcctcttttagcaagatgaagttaaaaccaggtaccatgattccgtacctggtttttggttctggtgacagtgcttttctgtctgctcatagttgttacaatttgatgtttcagtgagggagattagttatataggcttctattctgacatcttgcaccactccgtctcacttttttgaattgttgaaaccatggtttatggggaaatgttctgttctggtttttaccctcaagatcttctttgaaaatcatgatttactaagtaactagttggatagaattcatttttaagaaaataatgaataagtagttcccttagatatagcaagcaatgttcttataaactgacacaccaaaacacttaccagttcacctaaacactgaaagtatttaaaaatttatttttaacctttaagtttttctccatttgagtatcttgtgcactatacgctctcctacatatgtctacaatctttggtctgatttattttattggttgttgaatgtcagaaaccacctgaattttgcttgtatatataatgcccagtagagtgcacattggtaatcaatacgacttgatgataataatggtaatgaacactataatttgatagcatcaacttggcatgtatgccagaaataaaccatcataaacttcgagaaaaacaagtctcattaatctgtcatttattataatctccctccatcaagcgtagcctctatatactgtcttttttgccatatgtaagtttcttcttgtatatttcagattagagcttgcctcctcccacacactatcttctatttcacactgctctgttcaagtgtttatgtttctgctgaaggctgtataatctaagataatccctagctattgtaaatatcattcactggccagtcattgcattttgcacaccactgagagagtgattgtgagccaaatagaggagattttgtttccacccagcaacccaaaatgaattgtgtgatttgactattgatgccaattacatggaagttttactaccagaggcaaagctttaaactgcaaaagattaaccccatatagttggtgtcatgaggtatttaatgtatattggactatcaaagcgtctccttacaacaaaccaattatcaatgaataatattcttatcttattgtgacttattgaaactctttaaaaaacatgaaccattcagcacactataccgtctaaattagatatctaaactagccttcatttacatttccttgtttagttttaaatataatttcttctgaattcttagttgttaagagcaggtggtgaaagaatttaaagaagaaaatttgttgtatttattaagtgaaagagctttttgaaatgcattaaatagaagtttgtttctgcccatcagcttatcttctgcatattcctatttatagttcaaagcacttaagagttgcagagtgatttgctttttatgatcaccgcttcatccaggatcatttgccttatatcttcaacattttcagattcttataaatcttcacagttcacttagaggttagtttaaaactttcttcagataagaaattgactagatataaaattcacataatctcagagttagccatagatcaatatccccagtctttttctcaaagtaattgaacatttttgtttcccaggatagttgtatacaagcattttcatcctcaccatagatgattcttgttcttcagtatatgaggggactgtatttgcctgcttgttatctaaataaacatttttattattgtcaaaggaaaaagactctaatacagaaagaaattttgtgtccataggactagcctcattttggaggctgatattaatatttgactttattcattgtgtatttcttggttttgtcatttcacaaatttcccttctctaaatatgcattttttctctacctggaatagatgagttttaaaagacattactgtaaaataaaactgtgctaaatgtacttttcccagaaactctctttattttatcaattataatttgctttggctaagtgttacagaagctcaaggtagaaatgacttaaataaaagagaagcctatttctttctcctgaaaaaccctggaagtttgcagccaaggcagatatgttggccccgctcatttctgttttctactgagtgagttatctttacttggtggaatttcatccacatgttgcaagatggagctctcatgacatccacattccaagaaggatgtaagaaggccagaagaagggtcaaagggtgcataccaattgtcttttagggaagtttcgtgggagctgccatgttatatttccacttacgcttcattggccagatgtctgtcacatggccacatctaagctgcaagtggggctgggaaatgtgtttatttcacatgtgctctgctaaaaactgttcagtcatgaaaaaaaaaaaaagaatattggaagagaactaacagtcttcaacatgtatatttaaaaagagcgttatttttcttttacttatttatttttttttgagtgagagtgttgctggggctggtctcaaactccctggatgaagtaatcctcccacctcagccttctgagaagatgggattacagaggcacaccactgcacccggctcctgttttgttttgttttgttttgttttatttaaggagccctaagaagagtgtaaaaagggcaactttgtctttagttaacccttccctttttttttctttcctaattttatgaactctgattcagcccgcatcttactctggcttactaaattctgccaatataagagtagaagttttcatcatttccctaggtacctactcttctgtttctccatattctcaaagtaatttctcattcatcaacttttgtctgacttagatttaagctactgcttaggaaatgtgagaaatggagaatttggttgtcatagcgctcctacttagagggctaatgctttcctaaattttactaaagttggatcctaagttatataagttacctaaatttaattagcaagttttgcttactaattcactgactaaccactataaaacaaggacctaagtttaaagctgatattatgacaatgtactgaaatttcaagacattactttttctggacacgtaggatggaccttgcataagataaaagagcttatttttaggcacacctatgtgccaggcatgggttcagagccttacatatatcatttcattctcaagagaaccttaattttagagacgaataattttgagttttagaataaataattgtcttaagctcacacatgaagtatgtgccagagtctatatcgtgaccccagttatgaattcttttccactacatagcctgcctccatggcatttcacataggatttcttatgctcaaggattatgttcttccttccagatctatagacatcagtagaaacaacacaaatacgtataatgactttttaaagtctcatatacaagaccaaagtactttaaaaagatgtttaaatttttgaaggtgatatctttatgttcgagatcagtagcagaaatggattgtaattcattacaagatgcttagcaaagccaagtggtaaaggattttctgatgtgcttgaggagtcctgacttgctccttagcaaattcctacacaccattcagcattcagtgcaaataccacctcttggaatccttctctgttcttgatcaattattccattgtctggattcatagaactctctgtttacctatttatcttacaggttattatcatgagtttatatgtcttacatagctgtttgcaacatgttaccattcagtggagtactttttcctacagggaagaggctgtactatataccttttgtcacccctaagtggaatgcagtatggtttcatgttagatgttcaatacatgttaatattttattgatgagcccttaaatgtatataataagcttctcactcaaaagctgtaatattctagaatgaataagtttcttgagaaactctttggttaacagaatctccatttccatcatagtgtattcaataaattattaatgcagggtaaatttccttatatttcctttcatttcgctatactaaggtcaaatcatgacttttaggtgtggatacagcaatatataaaataatctaagacctggatatatgtttttctaattagggaattggagatacatgaacagtctctcatagagaaaaatatatccattagtcactaaagtcagtataacattctggtgaaaggtttgcttgcttgcttgtctgcttacttgcttgtttcaccttctattctaggaggatgtttgtcacaattatgaaattctaacgctttaaaaatctgtttaccctatgaaagttgcaaattcttgcctgtaaggcaattttcacaagaattattttcatattagttttagtttatccgtggatagtctcaaattcctcttgaaaatatcagtgttctcaagggaaaactgcccattacaagccacagatgtggttttttgagagatttctgcctgaaatacaagttttaaaatattctttgtagtttcctagtatggctagatacttgtaggaaatgacaatttagatgcacatttgaaaattcttagcctttgagtaatttatatgtttgaataaatttaaactatctttgttcataaaaaggcaaattttgtctgtttgtcttgaaatgcttttttagtttcttcttcagttctttcacttgtctttctgtaatattcaaaattatagcatagtacttgaaaaccaaggatggtccagtctgtgtcctttgttttgaaggaattttggaatcatcagagatataattctggaatttctttgggtaccttccataaaatagtagcatcctgataaggacgtagatgctaacttttatttttatctcattttctttcccctatctctcagtaatgtaggagtgacccaaggtagctgtttattgggccctcaccaaagtcaatcaatattagtcagctacaaccacaataatgctgtgtgacaagcataccccaaaagaacaataagcacttatcctcatattcacaggcctactttgagtaatctctgattcagaatctgactgtaggttgaccaaacatgtctgatctatgtgtctcattctggggctcaagctggaatggcagtagatatttggggcacattcctccatggctgagttctaaagatctcagaagggtaagcagaaacacatgatggttcttaagacccagatttataactagcgttctctcttccatccatagtcaattgtcaaagcaagtcacgtggcatatccaaagatcagggatagagaaatacacttggcagttagtgaacccatttcaagagtgtgggtgtataacactactacaaaacagaactgagacttgcaacttgaaataccacaccattctagtagaattttattacagtattaattaaacatttttgataaaacacagacaactctgttagaaagcccaacttacaatttgttgatcccacttggaaaggtattctgaatccattttttcacaagttttctttctaattcaatgtgttggggtacttttattttacccagaaaagtaatattataaagcataaagttaatgccccctgtaaaaatagaatactgaaacaaactttaagtcacaattttattatttactgacttgagaatctccttgtgcttcagcacacttggtagttggatttccaaatagcatcatgactttccatacccagctgtctgctgctcaaaactaccataagctgactatcacagctcacaggatacccttgaagaagaccatctggtttatgtctcttggcaaaatttgtttaaaaacaagcagctgcatgacaaagtaagaaagagtctctgtctagctgtggtaaataagtagctttgcaatactcataataaagcatttttctaatccaagccaacatcttcaaaaggaaagcattattttcttacaactgaaagaaaaatctacagaattcagtgatgagggaaggactccattaaatttgtttcagcagcttgagatagtgagaaaaacaaaacaaaataaaaacctgtttgtgattagatacagtcttgtaataactagttttaaaagtatttatttagaatctaatacttggatattattttaattctttatattaagagatttacatttcataaaagcttgtcctttgaaccctaatactcatattgtgatggtgagccggaatgagtaaggtcacttactatatagtcggtatataataattcgttgaataactctctctcctcctgttactggcagtgaatccatacgggtcttcagcaaccttaattcatgcctcctcagaagaaagaattcgaccaaggaggcataaggcagaagaagagactgaggcaagtgttagagcaggaatgaaagtttatttaaaaactttagagcagaaatgaaaggaaataaagtacatctggaagggggccaagtgggcgacttgagatattaagtgtcctgtttgaactttgatttatggttttgtattttggcatacttccatggtcttatataccttctccccaattcttcccttggggtagggggctatctgcatgcacagtggtctgctgacacttgggaggggagcatgcacggtgtatttactggagttgtattcaagaggtgttcccttaccagtcaagtgtttccagaggaaggtcgtataccagttacactatgacattttgcctcttagtgcgcacgcgggagcccatttgcccaactcctgcgatcttatcgggaagctgctgatcaccaatttcaggtgtttttatctattgggagactgcctttccctggtattggctgtgaccaattattattttaaagacacagtttaataaccacctgactgaccatcacttgatggttgcctgacattcctggttggggtggcgggggtggggggtctcctaccctgctcatatctgactagctatctactgtaacactactattaggtatgtctgtatcccattacactcactctctattacaaaaaagagtaccttattcatttttcaaaagaatgagtgaattttctgctccagttaagtgcttttccttacctctatgtagagtgtcaaactagccatgcttaaggattgattctggtattaataatataaattcttgcattatgagtgtctcagtttgggttcttacataagcaaatcctgagacaaggatgtgagttcaaatagtttctttgggcagtgattctaggaagctgtggtaggatgttggagttgtgagaaagttaagagaaagcaacctgtaaagagtatgttatcaagccaaacaccactgtgagaactagggcttaattccctggagaaagtctgggaaggcataaaacacttgtctcagagttatcttagacaaggtgcaggagctgaggtgtttatatttcaactcttgttagtcacttttaaagggccgctcagggtgtcagggtattaatttcctcttgcaactacttccaacctgtttttgcatgtggttgtagctactttttctgcgtcaaagatagactttaggctaagacatgcagtttccggctgtaggacatcaaccagagtaccctggagtgtccaggcccaagataatgggtgagctccacctggatctgtggcaatgtgagggaggggcattattaccctagcaagggccactgcacttccctatccagctggtcactcttctgcgtatttgtgttacttttctgactcctgcattcctctggatcctgattcaccatcagcttttgtattctgaggcttgtgtggctgtgtctttctatttcttccttattgacttacttgtttaatcttttgctaatgtatacctttgatattcctatgtactcacctttggttagctctgtgaattattgagtcttgctttacagctttaaaaagatcatagccatggtttgttttttaagtgtgattcataacagttagtgacaaaattagaagtggaaattaaaggtcacgtgcacaatcctacacaagccaatttcttgaacgacataaaatacttgaatttgtcttttactatcaccaatatagaaataatttgggggtatttctcaaagtattgatttaacaaaactttatttttgtgtgaagattttttcaagtctcctggaaattattcaaattattgtctttaaagtcaaaggaaaggttaatattagggttacttttctttggtcacagaattgctggaggcttctatgacttgctttgaagcagctgactttatgcacagttttggttagaaattcactaccaattccaacattttcaaagtcctaaaagaccaaaagtacaattcttgaaatatccctagagaaagcaagaataaattagttttcactagaaatgaagacaaatttttctcattagttcattttgcctcatgatcagaattctttgccacatgaaaatattttggttaataggttgtaacataaagagtaatatgaatagagatctagcccaattagatgacagaaaaagagcaaagcttttgaaatgtataaagaagaaagtttaagagagacatgaacaaggctggatgtagtttaaggttgaagaacacagaaaaatgagataagtgaagttaagtgaaaatccttcccttactgagaagaaagagaactcaaaattatgtgaaggtttttgttttactttgttttgcttcttaataaggaaacaacagtggcaaatctggggcattaggaatggtggaacttctataacagtgatgtttcaaaggtcacaaaggaaattaaattgtagattgggtttaaaagcactggaattacttccagccccattttttcaggattttgtatgtagcaggaaatagatcaccgcatagctaaaggggagaatttaggttttaactggtctcagtgcaaactgcttcatagttcctttgcatttggtggtgtatgtaaaacatgaaaggtataaacatttattatcataactttattattatacaactatttattggctgcataggaccatgtgtcttcttgcaggtataatcaaaaataaaaagacagaaatgtatcttatatgaaggctgccattatcgctcttatcaatggccataaaatcagatttcttacatgtacaacatatgaaaatatattaaatatgaaacgttttccattaaataattctgtaaatgattttcataacatttctgtccatgatgtgtaaatctgtagatcaaatactgcaagtgtacagaacttaaaatgctttggtcaaaaaaattctcttattaatatgacaatggcgttcaaaagtaaaaaggtaaaaatacagtttagcattaataagtaaactcagaaagtaaaatatattgatcatacagtctgtattagtctgttctcatgctgctctaaagaactgcccaagactgaataatttataaaggacagaggtttaattgactcacagttccacatggctggggaggcctcagggaaaacttacaaccatgccagaaggggaagcaatcacatccttcttcatatggtggcagaaaggagaagtgctgagcaaagggggaaaagccccttataaaaccattggatctcatgagaactcactatcacaagaacagcaccatggggataaccgcccctgtaattcaattacctccaactgggtccctcacatgacacatggggattacaggaactacaattcagaatgagatttgggtggggacatagccaaaccatatcatttcatccctggcccctcccaaatggcacgtcttcacatttcaaaacacaataatgccttcccaacagtcactcaaagtcttaactcactctagcattaacccaggagtccaagtccaaagtctcatctgagacaaggcaagtcacttctgcctaggagccataaaatcaaaagcaagttagttactttctaggtacaatggaggtaccagcattggttaaatacacccattccagatgggagaaattggcccaaacaaaggggctccaggctccatgcatgtcaaatccaatgaggcagtaattaaatcttaaagctccaagataatctcctttgactctgtgtctcacatccaggtcacgctgatgcaaggtgggctcccacagccttgggtagctccactcctttggcgttgcagggtacagcccccttcctggctgctttcacaggctagcattgagtgtctgtggctgttccatgcacacggtggatcaagccctcttctcacagctctactaggcagtgccccagtggggactctatgtgggggctccaaccccacatttctcttctgcactgacctagtagaggttctctctgagggccccatctctgcagcaaacttctgcctggatatctagacatttccatatatcctctgaaatctaggtagaagttcccaaagctcagttcttgacttctgtgtacccacaggctcaacaccacatggaagctgccaaatcttggggcttgcaccctctgtagccatgggctgagctctatcttggctccttttagccatggctggagtggctgggatgcagggcacctagtccctaggctgcacatagcaggggggctctgggcccggcccaggaaaccattttgccttcctaggcctctggtcctatgatgggaggggctgccatgaaaacttctggcatttcctggagacaattttcccattgccttggtgattaacatttggctcctcgttacatatgcaaatttctgtagtcagattgaatttctcctcagaaaatgagtttttcttttctattgcatcttcaggctgcaaattttctgaacttttatgctctgcttcccttttaaacataatttccaattccaaaccatatctttgtggatacataaaactgaatgcttttaacagcacccaagtcaaatcttgaacactttgctgtttagaaattccttccaccagatgccctaaatcatctctctcatgttcaaaattccacagatctctcggacaggggcaaaaagccaccagtctctttgctaaagcgtagcaaaagtgacctttactacagttaccaagaagtttctcatctccctctgagaccacctcagtctggactttattgtccatatcactatcagcatttgggtcaaagccattcaacaagtctctaggaagttccaaactttcccacatcttcctgtcttctgacccctccaattctctaggaagttccagagtttcccatactttcctgtcttcttctgagtcctcccaactgtttcaacctctgcctgttacccagttccaaagttgcttccacatttttgggtttctttatagcagtatcccactctctgtggtaccaatttactgtattagtctgttctcatgctgctataaagaactacctgagactgggtaatttataaaggaacgaggtttaattgactcactggtttgcatggctggggaggcctcaggaaacttacaatcactgtggaagcagaagcaaacacatcctttgtcacatgatggcaagaaggagaagtgccgagcaaaggaggaaaagccccttatgaaaccatcagctctcatgagagctcactatcataagaacagcagcacgggagtgaccaccccccatgattcagttacctcccactggatccctcccatgacatctggggattatgggaactgcaattcaagacgggatttgggtggggacacagccaaaccctatcactgcctttaagatctatgaattgtttttctacattgaagaaatttgtagacatttgttttttattctctttttggtttgctgagagcagtagtctcttggaagtgagtttcatttacattttttcctttgggtgtcaaatatataaaatattttttaaaatcaatggctgagggataaatgagggttggtagaaagggaaaggataagggttgtagttaacggaccatgttttaatgtgtctataattagatggaagttgtctcttaccattcaacatcctggatggccttcctatagaggacattttcatcttcttttgtcgtccagagctagcatatgtgtttcatgtctttagatagtgaaaatcaattcagattttcatggaaaatgctctctcttcatcctaaagacagaattgtcacggctatttcgtttattgaaaagtgaaacctgctacagttagcatatagttaattccatatatgttacctgtatcatttaatacattcacaaagtaaaaaaccaaattttgccaagttcttgatagtaacaatagtaaaatggaatttctgttggcatattttcatgttattctgaaatgctgaatggatttattaagattgataacaatatgttgtacctttatgttctaaaatttaataacagttattcttccaaacatgccagcgtcctcaatagttgacagtctgcaaaatattctattatgcaatcagccatatctccttcttgagctttctttaagtacttgtatcctgtatttttccctgaaatctagcagtaagttgaagaaatgataaacaaaattgtatcattgtatataatggctatttataaatactgatgtacattttcataatgttatttaaatgattacttcagatatgtatttctgttttctacattttaacttctcaacatattaggttgttatcttagattggattttctaagacatagactctaagacagagatttccatgcagatggtttcttagtgagtgcttttaagaaaaatgcctgggagggagtaaaggcagcaggattgaggagagagaggagttgaatgatgatgcagtgaaatggaagatcttatctggtcccatgtggggttgggatgaccatttagagtattaccgtatgaagcaaggaaggtggaccattgtatccctaatccattagtcattagatgtgagcctcccaactaccagcttccgggcaatatcatcttggtcaaagaagtgcctgtctgctgagagaaatttcttggaagagcttaggtatgatctgttagtagataacaatcccagcaactgggagaatgaatgcttcatttgtaattggtgaatctcggtggcacaccacagtgttcgctacggtaatctttatacttattgagacatatattgtttttaagtaaaacttgtatacctagtaatgcatttaggtagtgtattggccaagctagtcctttttggaaacaatttcattgtggtataaatgatatacaataagctacacatttaaatagtacaatttgataagttttgacatatgcaaataccagtgaaactattagcacagtcaagataataaacatatccaatatcctcacaagtctgttttcggtaatcactctctcctgcccctcccttgattcccaggttaccactgatgctgactggcattatagataagtttgcgttttatagaattttataaaagtagaatcatgaagtatgtaccttatttctggtctgccttctttcactcacaaactactaactttcattttgtgaataatatgatctccgtgtgattacacacattaagaaagtcaataaaaacattgtaatttgattccgatactagtttatgggtctacattatgtatttaaagatactatcatgtttggattagcccttaggtatcaagtaaccctggagttgaggcagttactgttttatttgctatcaatctttttataagctcaccttccactaattacccaaaaatatttgatttaatacctgagtacagaaaaagaacatattcacaatgtttaaattttataatttaatattataatttacaacagtttaaaataactagtcctgaaattgagtatttctcacctaatattctgctctatttattacccactccacgaaaaaatttcccagaaaaatcacaaacatgtctcttgagtgtattattacccaacccacagaagaatttccaaaaacagtcgcaaacattctctcttgagtgcaaccattttctcgggccagccattcattgaaacaaaatagcctgtataacttctgtgggtagacatttgtaggttgttcttttgaggcattagtgctattgcatttaagataaagaaataacgaattcacaaattttataaagttctcttaaatttaccaagtcaatagcaccaccactttgattcctataacctgtgacttagttaggcttctcaattccaagaacataccaccattatttcttataatgtcctcagattaaaacatgtgttgtcctttctttatacctccctgcactttaattgaatattttgccatttactggattctgtacactttttatgttttcatgccctcccttttcattctcctggacatcaatcgcaagtcagtagataccttgtaagagatctctctccacccaaatcactgtttcttttgaaagagttaacctttctgaagcagcactcctgcttcacatttcccagcacaggaaccttcagtgtttctctgttgatagctttgatttcaaacgggtagccccaggagaaaagagagctgaaggatatgttttgcttggctgctttgtttgacctgcaaggaacattaaaaggcaatgaaaccgggcagagactggactgatcaacaccatcagtttagcacttattgctatactttctaaggctttacaattttatgtgtcccacgtgtcccctgaaggcatttgattttctaacctcctaggccagaggctaacatccagaattcatagtctggcacttataaaccctaacttagcttctgtcacttgtatctctatgcaactctacagcaaaatgtacttattttctctaaaatacccttattccatacttctttggagtgtaattttatatataaaagtcctcaccacctgtaaacattaggaagctttgattcgaagaagcagaagccatctccatttaactgaagtgaaatgaaacttactggagggataatgtatagttcttggaaatgaaggaaaagaaggcaactgtggcagagggagggcagcactgagagtcaggaactccagggaagttactttttggatgctgtcattaaaatgcttcagcttcaaattgtactgactctacctttctcaattctagattcaaatttctaaatgtaattggcataaattaggaacttgtcccaccagtttatagagtttacagagcactatgattataggtccccctaagatcatgcagaatgagggaagagtaatttcatccaaggaaaagcagggtaccattcaccaaagagtggagatacttattcagaacaattaatgttagatgccacaaaaaaactaaccctgaaatcaaagtggcctaatgaatgcttatttattgctcatataaagtctgatataaatcaggtagcattccttcacagtgactcagggacctaaattgctttcatcttgtggctctgccatgtcaacattgaaacttcagaggtattgacaaaggagagctgagaaattgacactaactatcaagtacctcaggcaagaagtgatgcatcacttcctacactttcccactttccaggattcaatcacaattgcactcacgaaacctcaagggaacatgagaaacataatgaaatcaataccaagatatccaaagagtactaattttcttcaccacagaagggatattggacagacaaaaaattttgggacagaggaatatccactaaatgatccttccatgccctgctcagatgctacattttccattaaggctctcttgaccaacccataaggagatgatctccaactcctctgaacatctggaacattgcattctacttatttttactgtctcctattgtaataattgttggctattccttattagacaaattataagcttttatgggacggtgatcaaaagtcctaatttatcttgtcttcctacagcattcaaagcattgtagaccttcaatacatagcagtcttcgaagccagagtattagtattttttctaaaactgtattcatcgcaacgaactcgatggatgttcaataaaaatgtattgaatagtcattcatgcagatagcaaatttcttaaaacatttcttactcaatgtttacttatattcatcatgaatataaatttaatataataatatcaaatcccattacatttagtacaaagtaaatataccaataattttatatatgtttaagtgaatttttatatttcatattatttgtgaatgatacacatcgtcgtggaaaatttacaacgttgaagtaaattatacaatatagggtatttgtattaaaatacatttcatagaaggtgctttaaatttaaaaagttagcatgaatacatattaaatgtaaaagagtctttaaaatgaaaaatatttcacacttgtgggtttgatctaaaaatatcagtcgctatatgatatggctagacagatttgagtaggtataattttaatgaataatattgtgtgatattttagggtccaaaattgaatgtttctattaagtaacagatatttaaatgccaagcagaagctacactggcaaaacaagatttagtatgttatcttaagtgtatcctaaatcctctttcatcttatggagaagaaatacatgcttttagtttccagccactcctgtctatattcatttaaaataaactattatttatatcagatatgatgccatgtgagtccacaatttgtagtatagagaaataatttcattgaattattttggctgtttgtacctgagacctgattctgaatcatttatttttctatttaagttgtgctattttatgatcctacctatggctatgttcaaaacaatgacaaaatatattttaccctgatctttttttcattattatactttaagttctgggacacacgtgcagaacgggcaggtttgttgcataggtgtacacgttccatggtggtttgctgcacacatcaacccatcatctacattaggtatttctcctaatgctatccctcccctaaccccccatcccctgagaggccccggtgtgtgatgttccccgccctgtgtctatgtgttctcatcgttcaactcccacttatgggtgagaatatgtggtgtttggttttctgttcctgtgttagtttgctgagaatgatggtttccagcttcatccatgtccgtgcaaaggacatgaactcattcttttttatggctgcatagtattccatggtgtatatgtgccaattttctttatccagtctatcattgatgggcatttgggttggttccaagtctttgctattgtaaatagtgctgcaataaacatacgtgtgcatgtgtctttataggagaatgatttataatactttgggtatatatgcagtaatgggattgctgggtcaaatggtatttctggttctgtatccttgaggaatcgccacactgtcttccacaatggttgaactagtttacagtcccaccaacagtgtaaaagcgttcctttttctccacatcctctccagcatctgttgttgcctgacttttgaatgttcgccattctaactggtgtgagatggtatctcattgtggttttgatttgcattcctctaatgaccagtgataatgagctttttttgatatgtttgctggctgcataaatgtcttgttttgagaagtgtctgttcatatccttagcccactttctgatgggtttttttttttcttgtaaatttgtttaagttccttatagattccgggtattagccctttgtcagatgtatagattgcaaaaattttctcccaatctgtagtttgcctgttcactctcatgatagtttcttttgcagtgtagaagctctttagtttcattagatcccatttgtcaattttggcttttgttgctgttgcttttggtgttttagtcatgcagtctttccccgtacttgtgtcctgaatggtattgcctaggttttcttctagggttttgatggttttcggttttaggtttaagtctttaatgcatcttgagttgatttttgtataaggggtaaggaaggggtccagtttccgttttctgcatatgactagccagttttcccaacaccatttattaaatagggaatcctttccccgttgcttgtttttgtcaggtttgtcaaagatcagatggttgtagatgtgtggcattatttttctggcctctgttctgttccattggtctatatatctgttttgctaccagtaccagtctgttttgcttactgtagccttgtagtatagtttgaagtcaggtagcatgatgcctccagctttgttcattttacttaggattgtcttggctatacaagctcttttttggttccatctgaaatgtaaagtaatttttcctaattctgtaaagaaagtcagtggtagcctgttggggatagcattgaatctgtaaattaatttggacagtatggccattttcactccactgattcttcctaaccacgagcatgaaatgttttttccatttgtttgcgtcctttcgtattttcttgaacagtggtttgtagttctccttgaagaggtccttcacatcccttgtaagttgtattcctaggcactttattctctttgtagcaattgtgaataggagttcacccacgatttggctctctgtttgtctattcttggtgtataggaatgcttgtgatcttttcactttgattttgtattctgagacttggctgaagttgctcgtaatgttaggggcagccagagagaaaggctgggttacccacaaagggaagcccatcagactaacagtggatcactctgcagaaaccctacaagctagaagagagtgggtgccaatattcaacactcttcaataagggaattttcaacccagaatttcatatccagccaaactaagtttcataagcaaaggagaaataaaatcctttacagacaagcaaatgctgagtgattttgtcaccaccaggcctggcttacaagagctcctgaaggaatcactaaacatggaaaggaaaaaccggtaccagccactgagagaaacataccaaattgtaaagaccatcgaccctatgaagaaactgcctcaactaacaggcaaaataactaaccaacatcataattacaggatcacattcacacatgacaatattaactttaaatgtaaatgggctaaatgccccaattaaaagacacagactggcaaattggataaagagtcaggaccatcagtgtggtgtattcaggagacccatctcacatgcaaacacacacataggctcaaagcaaagggatggcggaatattttccaagcaaatggaaagcaaaaaaataaaaaattaaaaaaaataaaaaaaaaaacaggggttacaatcctagtctctgataaaacagactttaaaccaacaaagatcaagaaagacaaagaagggtattacattacataatggtaaagggagcaacgcaacaagaagaactaactattctaaatatatatgcacccaatacaggagcacccagattcgtaaagcaagttcctagagacctacaaagagacttacactcctacacagtaatagtgagagacttttatactccactgtcaatattagattaacgagacagaaaattaccctgatctttaacattccaggcaagtatgttttcagtcatacatagtacgtgaatctgttatattttaaatccaagcttttggaggacaaatgatttcacagttatacaactcagcctctcccagactcaagtctctcacttgatgcagtattcccaccccatcttcaataaaagaagaaagcatgaaacatcgcattgatatagggaaagtatatctgagttttctatatagcatataaagaagtaaaataactctgtgatttgtgatgagatagatttagctgcaacaatgaggtctggatattaatattggattaacttcctttgagattgcaacttccatgtggcattcagcactttccttgttttctcatatgtaggccgagaataaaattatcctgtttctatttcccaacatgaaaggtcttttaactgtttgaagacatatgtttcatgtgaaaccaaggaattgctactgcaattttgtaagacagaagttagcaaacttattctgtaaggaacaagatagtaaatattataggctttgcgggccatatggtctatctcacaactattaaactctgccatttttttttttttttgcaaaagcaaccatagacaatatgtaaatgaatgagtgtgattatattccaataaaactttatttttaaactacaagactagttcttaaaataaaatttaacaaagaactattatatgatccaataattccacttctgggtatatacccaaaataattgaaaacaggtattcacacagatatttgtacacccaagttcatagcagcatattttactgtagagaaaaggtagaaacaaatgtacactgtgtacactgaccaagaatggagaaacaaaacgtggtgtatccatacagcagaacagtattctgctttaaaaaggaatgaaattctgtcacatcctaaaatagggatgaactttggagatattccacctagagtagttaaattcttagacaaatagttgcatggttgccagggaccagggaggggtaggggaaatgagcagttcttgtgtcattggtatagagtttcagtttagaaagatgaagagttttggagatagatggtggtgatgtttacatatccatgtgaatgtatctaatgccactgaactgtatacacttacaatggttgaaatattttgtatattttcccacagttaaaaaagacaagcccatgtgcccaaattgctgatataaatctgtattcctattagtgagcagtaatgagccatgtttagtgcagctgatatggttaagatggaacaattgcatgtaatgcaatggtgggtaacatctaataaaaattggtactcaccaatttccatttccattgtggatataaacacccttcacattatgaatcatgttatttgttatttgtgtacttacttattaaatcacttttctccatctctctcacctctatgactctgtacatgtacaaacaacatacacactgtgaacttctttagaatgacagttacattttcgttacttgattcattgtttggccaagtagatacccagtaagcataactagcaagtgaataatgtatatgtgatcattttccttttcaaaaaccacttcttatctctaccacaccaccacacattattatatgctacacttcttatataaaacaaaaaagaataggccaggtgtggtggctctcgcctgtaatcccagcaatttgagaggccgaggtgggcagatcacttgaggccaggagttagagtccagcccagccaacatggtgaaaccccatctctgctaaaaatacaaaaattggccaggcgtgttggcgcatgcttgtaatcccagctacttgggaggctgaggcaggagaatcactggaacccaggaggcggaggttgcagtgagctaagatcatgccactgccctccagcctgggcaacagagcaagactctgtctcaaaaacaaacaaagaataaataagctttaataaactcttttgcagaagagttttcatttttaaacatagaggaaaaagaagatgaggatgaacgatagtgatgcccagaagagaaaattgtgtaagacaaaatcaattgaccaggcgtggtggctcacgcctgtaatcgcagcactttgggaggctgagacgggcagattatgaggtcaggagttcgaaaacagcctagccaatatggtgaaaccctgtctctactaaaaatacaaaaattagccgggcttggtggtgcacgcctatagtcccagctacttgggaggctgaggcagaagaatctcctgaacccagcaggcggaggttgcagtgagccaagatcacgccactgcactccagcctgggtgacagagcgagactacatctcaaaaaaaaaaaaaaaagattaaatcaattttagattgatatagagataaataattccctaagtacaattaaagcaaggatcagaccctgatgagtaaggatgatctaacaaagggctgacaatataaagtgaatgcgattgtcaccaaataaacatctcccaagagctttgggacaatcttcagctaagcatattctgcactttacatcgttctgccatatgccctatgtagcttttcatcctccagaaatttgaatagcacacagtattttttggcaccgagtaattgtggaacttaaacttcctacaaagagagaagctgtttcagtcagctaagtgaccagttagtaagcaacttctattctcttagtgtcgatagggttaaagacagtcataagctccccaaacccttggccgcctcaattttttcatttaaatacttatcttcttatcttcatctattttttagagtcacacataaactctgtctatgaggttcttaaagacctggacaatatatttaatctctgtatccttaaatctcaccatgatatctcaaagatggtagataaaactgttttccctcacttctctgactccataccaatacttaatcgatcgggaaagttttataaaccatttaccgttgaatataaatatatatacacacacaaacatatatatatttatatatatttatgtatatatatatttatatatctatatatatttatgtatatatttatatatatttatatatatttttatatatttatatatttatatatatttatatatttatatatatttatatatatttatatacttatatatatttatatatatatttatatatatttatatatatttatatatatttatatatttatatatatttatatatatatttatatatttatatatatttatatatttatatatatttatatatatatttatatatttatatatatatatttatatatttgtatttatatatatttatatatacacatatttatatatttatttatatatgtttatatatatatatatatggcactatatatcagtgagcaaaggcatcataatctttatttttatttctgtattcatttattcaacatatagtaattctgatcctgtctcaaaaactctacagaaattaacaaagaacacattgtttctgcctttttggagctgaatgtttagtgggggaaaatgtattttaaggcaataatcatatacatgagtgtatatttacaagccgcagtaggtgctatgaatgaaaagtataaggagctatgagatattctaacaaaaagaaatgctgcagtctagagactgagagtaattatctgtgaggaaaagtattgaagcagagacctgcaactcagtaaagagtgtagggagtcacatgaacaaagtcttgagatgttggtagagatcttggaatgttcgaaattctaaaagaaagcccttgtgtatggggtatggtgagagagggagagcgtggcaagttttacgttgtacaagtcattgtaggccacaaaaataagtatagattttatctaagtgcaacggaaaaccattacaagtttattttttgattcttaaattttgttttacttatttatttatttcaagacacaatctcactctgttgcccaggctggagtgcagtgacatgatcacggctcactgcagccttgaactccttgggctcaagcaatcctcccatatcaccctcctacctcagcttcctgggtagctgggactactacaggcatttgccactatgcctggctaactttaaacaattattttgaagagacagggtcttgttacgtttctaagtttctaaggctgatcttggattactgggcccaagcaatcctcccgcctcatcctcttaaaatggtgggattacagatatgagccacctcacccagcaaggtagtgacataatcattgtttttgctgaaaacaatgtactttagggaacctccctgaaaacagaatggccacttagaataccaaagcatagaccaagccttgagatggcaatggaagtggaaataaacatgtctttgatacttatgttaatggagctattagtagcaacttttgacagatttgaaagtggagttgaaagacagtgaagtgtcagggatgatccctgagcatattagataatattgagctggagaacagaaaagaaggggcagatttggaggtggagacctttctagatttatattcaatttgagatacatctgaaacatctacatgaaacgtggatgaaatatctgtgaccaagatacatacgtgggatacctaggcatgtaaataatatttaaagttatgtgagtgggtgcaataacctaaagagagactgtaggtagaagattgatcaggacaaatctttgaggaacttttttttttaattattattatactttacgttctgggatacaggtgcagaacgtgcaggtttgttacataggtatacacgtgctatggtggtttgctgcacccatcaacccgtcatctacattaggtatttctcctaatgctatccctaccctagccccccacccccaacaggcaccagtgtgtgttgttcccctccctgtgtccatgtgttctcactgttccactcccacttacgagtgagtccatgcagtgtttcattttctgttcctgtgttagtttgctaagaatgatggtttccagcttcatccatgtccctgcaaaggacatgaagtcatcctgttttatgaggtacttttaatgcatttagtgactgggtaaggaataaccctgaaaaggagcacaaaaaccatcgaggtatgaagaaagccaggagatgtagtttcacaaagcagccagtggacagtaatggacaccagcataagcttaagacagcagtgatagtgttcatcagtgctgaaaactcattggaagtggctgaccatatgttgattgcgaatgcaatgccttctcccatctcctattgcttttcactgtttccgtcatgtccagagtgaaaacactggggaggcagaactgtgtaccaagaaaaatgttttgtgtcagaggaaacaagagctcattaatttccttttgacccgcatggataggaatacgataagcaggagaaaaataaaacctgctaaactaggcaaataaagcttaatagaaaagagagaaaatattgcttacaaagggaagaagacatttgccacaatattagctaaaaagagagtgaggaaaatccacatttaccatttttattatgtgtttccaaagtcgacattaagtgaatattatcactttgaagacagagaatagattgtaagcagaagaggaagtgggattttttaaatggcatatatttaaatgttgaaaaacccatttccaatactcccactgagatatatgcaataaaaacactccgcaatcagtaatatacatgtgaagctcctaaaaatcctccattgagaagattctataaaactataaagtattattatttctgctatcagaaaataaacacatactttctaagaacaagatgaagaccttaattcatcttcccaggaatatacttgtgtacttaatggttcaaggcgtttgtgatgcaaaaaaagtgggacattatgtacaaaatagttttaatcagaaaatgaaggaagtttggtatggtatggttctagggttgcaagttttcctgcaaaaagggagtacttatggctaggtgatgcagccaaggaagcatctctgaggacaggttatcctggctcctattccaaaatatttaggtctccttgagtgttcgatccttgaaccaaggacaagaatagaaagaaataaaagccacttgtataaaggttgccttcattttgtgtcgaatattgacaggagaaagccagatttgtagcttttccagggataagtgagtctcagacacagttaagagcttggctttggaattagattgacctgagtttgaatcgtggctccatcaatctctgattgtgtgaatttttggcaagttttagctgaacctcaattttctcataagtaaaataggcataatacagctatgattctgacccttgccattagcactctgagctacttgtcagtgtatcctggtctcttcctcaagcacttttccactttgttatttcaagattctttgaaattatgaacagtagctcttgatcaccaaacaaatgggagaccatagattcaaaggaacattttagtaggatatttgataagctttgtatttttttgtgctttgaaaattagagtagatttagatttaaggaactataaagctatatgtttacaaaactttattcagttgggcagttctgactcagtaactgaaataaaattgatgaaaacaaaacatatgttttactgttgtgttcacatttaaagattatttaatgcataaccaaaataggttcagcaaatgtttatacatacatgtacttagatatttgtaattcttatggtagagcatgggaatgaatgagaattctcctaggctggaataaaactaatgtctaactaagaattggcctttcacttcacgaatatatatcattatatataaaagattcatcctttgttaacttatttgtttagcttagtactttctaagtacttttctatcctgtcttggtccctatataagaatgatactattataaaaatgaacatcctattatttcataatgattagcatatcagcatatttaagagcaatgcctatatctttaccttcattattattttcatgtttaaaatcctgataattctagaaaaacaaggttgtaattatccattcataataaaagtcacaccaagttattcttgataattaacttggcatagtggagtgcactgagcaattaataattaattacgtggttactagctcaaattttattgagaaccaaggagttaaaattaatagtattgtgtttgcaatgagttaattactttgtttctttgtttttttttttggaatagtgccataattagtatcctaatagaaacagaatataaagtgggtttctgagtgcttgcttgtcgaggtgtgtaacaacatatattttaattataatttgagtcactaattgttgtcaaatacaattttaatttcttagttcagagattaaaagatatgtaaacagctccaaaaaagaatatgataagatggtttatacaagtaaataaataactatatgacttcagaagttttatttaacaacagttgtataagtgttttaactaatgttaacaatgccttttttgtaaatctcctctaccacaaatatgagataaatttaagaacggcattttcattaaatattgattattaaaattcatatataagtattggctgtacctgagcatttacagtgaaaccatgaaggactggcaggtttggggctgtttgataatatccttccttaatctttcttcgtagcatcattgtttaattttggctgaccacaatcacttatgaaaagaaacagctcaaataattagtataacctctttctcttcataaaaccttcaaatcaatgtggtcataattatgaaagtgtaagattataaaatcttctcatttaaatatacatcttcatattagcagacttggctaatttcttcatttatccttgacatccacacttaaactctgtcaaactggtcattcatagactcattattcattcaacaaagattagtgtgaccctactatgattctgagggctagaaatataaaactgaataacatataaaccctgatttctgtatttatatatacagaaaggaattatgaactcacagttttaatgcacagtgacgagtcctcagttcatgtctgccttgggagctaggcatataccaaagcaggactgtctaacacagtttgggggtctcagtctggaaggatccgggtgagatgatccttgaattgagttctaaaaaatgaggagaaattatccagataatggaaagtttaggagaaattaaccagataatggaaagtttaggaaagaaacactatttatatgtcaaggacaaagtttgaccaaatgtgtctctgaatctaactggctttatgtaagataaaattaaaaaataattgtcactaaggtttttcacatctgcagcaactaccatcatatctggctcaatatttaaaagaaatacttaacgatttttggcatttattgctactataatagattgtgctatttaaagagaaattctagatacatgccaaagtattttcaggtgaagtaatgtgattcgtgggttttgttttgacaaacttccaaggaaattatttttaatataaagagcaatggaggaagattaaacaagattcgcaaatgttgataattgctcaaggtggtgacaggtgcatgggggtccataatatactgttctctttacttatatatgtctttgaagattttcatgatgtaaaattttaaaatcagaattacagtaatacctctttctttgacaatcgttttcaaacttggttcaacaactgaatttaaattacctacatggctataaaaataaattagatatcctggttatttggtctggggtgggtcctggccatatctgtagggtgtgtgggtgtgtgtgcatttagcttcacatttgactctgaagtacgtggaaaaccaattctgggctctacatatgcaattccaatgcctgacattaggtggtgctggttgtgagccatgatttcaggtttgacttgtagagttaacagaagtgatatcaccaccgatcccacagaaatacaaactaccgtcagagaatactacaaacacctctacacaaataaactagaaaatctagaagaaatggatacattcctcgacacatacactctcccaagactaaaccaggaagaagttgaatctctgaatagaccaataacaggagctgaaattgtggcaataatcaatagcttaccaaccaaaaagagtccaggaccagatggattcacagccgaattctaccagaggtacaaggaggaactggtaccattccttctgaaactattccaatcaatagaaaaagagggaatcctccctaactcattttatgaggccagcatcattctgataccaaagccgggcagagacacaaccaaaaaagagaattttagaccaatatccttgatgaacattgatgcaaaaatcctcaataaaatactggcataccgaatccagcagcacatcaaaaagcttatccaccatgatcaagtgggcttcatccttgggatgcaaggctggttcaatatacgcaaatcaataaatgtaatccagcatataaacagagccaaagacaaaaaccacatgattatctcaatagatgcagaaaaagcctttgacaaaattcaacaacccttcatgctaaaaactctcaataaattaggtattgatgggacatatctcaaaataataagagctatctatgacaaacccacagccaatatcatactgaatgggcaaaaactggaagcattccctttgaaaactggcacaagacagggatgccctctctcaccgctcctattcaacatagtgttggaagttctggccagggcaatcaggcaggagaaggaaataaaaggtattcagttaggaaaagaggaagtcaaattgtccctgtttgcagacgacatgattgtttatctagaaaaccccatcgtctcagcccaaaatctccttaagctgataagcaacttcagcaaagtctcaggatacaaaatcaatgtacagaaatcacaagcattcttatacaccaacaacagacaaacagagagccaaatcatgagtgaactcccattcacaattgcttcaaagagaataaaatacctaggaatccaacttacaagggatgtgaaggacctcttcaaggagaactacaaaccactgctcaaggaaataaaagaggatacaaacaaatggaagaacattccatgctcatgggtaggaagaatcaatatcgtgaaaatggccatactgcccaaggtgatttacagattcaatgccatccccatcaagctaccaatgcctttcttcacagaattggaaaaaactactttaaagttcatatggaaccaaaaaagagcccgcatcgccaagtcaatcctaagccaaaagaacaaagctggaggcatcacactagctgacttcaaactatactacaaggctacagtaaccaaaacagcatggtactggtaccaaaacagagatatagatcaatggaacagaacagagccctcagaaataacgccacatacctacaactatctgatctttgacaaacctgaggaaaacaagcaatggggaaaggattccctatttaataaatggtgctgggaagactggctagccatatgtagaaagctgaaactggatcccttccttacaccttatacaaaaatcaattcaagatggattaaagatttaaacattagacctaaaaccataaaaaccctagaagaaaacctaggcattaccattcaggacataggcatgggcaaggacttcatgtccaaaacaccaaaagcaatggcaacaaaagccaaaattgacaaatgggatctaattaaactaaagagcttctgcacagcaaaagaaactaccatcagagtgaacagggaacctacaacatgggagaaaattttcgcaacctactcatctgacaaagggctaatatccagaatctacaatgaactcaaacaaatttacaagaaaaaaacaaacaaccccatcaaaaagtgagcgaaggacatgaacagacacttctcaaaagaagacatttatgcagccaaaaaacacatgaaaaaatcctcaccatcactggccatcagagtaatgcaaatcaaaaccactatgagatatcatctcacaccagttagaatggcaatcattcaaaagtcaggaaacaacaggtgctggagaggatgtggagaaataggaacacttttacactgttggtgggactgtaaactagttcaaccattgtggaagtcagtgtggcgattcctcagggatctagaactagaaataccatttgacccagccatcccattactgggtatatacccaaaggactataaatcatgctgctataaagacacatgcacacgtatgtttattgcagcactattcacaataacaaagacttggaaccaacccaaatgtccaacaatgatagactggattaagaaaatgtggcacatatacaccatggaatactatgcagccagaaaaaatgatgagttcatgtcctttgtagggacatggatgaaactggaaaccgtcattctcagtaaactatcgcaagaacaaaaaaccaaacactgcatattctcactcataggtggggtgggaattgaacaatgagatcacatggacacaggaaggggaatatcacactctggggactgtggtggggtggggggaggggggagggatagcattgggagatatacctaatgctagatgacgagttagtgggtgcagcgcaccagcatggcacatgtatacatatgtaactaacctacacaatgtgcacatgtaccctaaaacttaaagtataataaaaaaaaaaaagttcgttcctcttgttagaattttcatacaaatgcaagactccttattttcaaagagaaaacaaaattttatataaactaatacctgagaagaataggaaaaattaatgatgtatgggataggtactgataagaacctcttcttttgtgtacattgtgataaactaatgtttaacttgagtcgatgtgctggaaatacttgttaaattttcaagaattttgagatctgttaaacacaaccattatcaaaaattaaattatggtaacttacattaaatgaaatatattgttcacaaatgtactagatgcacaaaagtcatcactacctaattcttttattatatttcactattatctacgggtttgttacctgtataatggaatgactgtataatggtgtagtgctaacttcatgtttggtgacattataatgatagcttaaaattaaacatactgggaatattcaaatatgtccttcctctcaggggatctgattgttagacatttaccagcatagcactgtcttaattaacatcatataattgtcttttatccttaagatgttgagccagtaaatatcacaggagagtttgttccttaggttttaatacttgctttaccagtttactgtagcatcatgtgaaaccagcttctagaccagctgtctttaattggtatgtacccaagctaatccttgtcaggctatcatcaacccaagcacttttgaagttatttttattattacgctacagaaagattttatggcctttttgctcttttctttaccctagccctaggatcatataatttcatctcctatttattcctatttatttccttatctaaaatcttacttaactagcttgcttgcctgcctgtctgcctgtctgcctgcttgcttggtttttctttttttctttcttttctttacttctgctttcctttcctttcttttgtttcttccttccttccttccttcttcctttcctttccttctgttccttttccttttccttttcctttgcgttcctttgctttccttgctttcttcgcttgctttcttttcagtaccacaaaaaaactaacaataacaaaaatattgctacaaaaattgtgacctcccaattctatcctcatttcacggacccataaaatgattatatatctatgccaatgcgttctaactacatgatattattattgatgataagagaatccaaccctcaagaaatgaagtattataatgttttagaacacacagaagcatttttaaccaaaatgttccatgtgattttatagggtgcatgttttaccttttcttatttggaaaagtagcaaaagtattaacaaataaaataagttacatactctttgtatataaatctttcgtgtacataataatgccatttcccttctagtgcttccattattgaaaaaaaatagacatatagcaacgtgctagacattgaagttaactgttaaaaagtcatcagagggtaatgttaaaggtggtatttcaggtaataaagcatatgcagaatgattctattggctttatttccaacatgagtgttattagtaccaaggacactgaagtttaaaggaggggagtgatgagactgatcattactttgtcttctgtaacaggacttaggtggcccagagtgatccttgttggttgattggttagttgaacttctatttttgttactaggcctgcagatctgtggaatctccagagtgctgtgtaatgttacataggccacacaccagacactgttccctgaaggactgaaggtggaattggaacaatatgtagacagttcttgttgcagttaccaaggaaatttggttaggattcaggcctccatgtcagaaaaggaagtctattttatgtgctagaaaaataaccctaatcatcttatcttgggtctctctggggagcatgatgatctacctggtcttgtaaactgtatagaaccggctgggttgagacacatatgtctcataacagagcttccacttaaggctataaaatagtggtccctctattgggtatatgccttatggaaaaatatacgttatgctggtacctattataaaaaccaatgcaaaatgattagagatttctaatccaagtgttatcctcatctgctcccaaaatacagcaatgaaaaaatagaaaataaaaaaggatatatttacagaactgtatttacagaaatatatgttgatgacaagataatcaaatacatatcaaatcatgatgtgtatttacagaaatatatttacagaaatgtaaagcagagaatggggcggaagtccctgacagacttgacactgaaccacaaaacaacagtggaagccaggaatttggatgctgcgggatagttgggattaaaattgcttcaagcaaggtgtggaactggagacaaactcagtattcaaaaccagaggctgggctgtggtgcttgcattcgtgaaagaaaacctggggaaaaagtgcttcttcaggctgtagcctgacgctatggcttgcctaaacttatgggcctatgtaggtgtaagaataaagacatagccttgctgctgggaactgtgttgcatctgttctcttgcttgatgaatggattgaaattatccccagtaacattgcagtgcaagaactttaaaccttaaaggggtggctggagaccacgggacgcgatgcacatgcaactactaaatgctagatgaggatacctgaggagagagaacaagacacaaacgtgaacatggacctccaatagaaatgacaatcgaaaacatacatttatcttctctctctcccaaattgttcaaagattacgctaagggaataaaaacaatacagtcataaaatgacaaataaaatggaagaagagacatctgcacagacatatcaagtcaatgagatgaaaattaggacaagtaagccaatttgtttttcaggatcccagaaaaacttgtggattgaagacgctaggtgttttagaaggccatatattcccgagaggggctggaaataaaggggttgttttgaatcccttaaaaggggcaattacatttcatgtccccagctcagggtagttaattagacactactcctctctcatcccagcagacgtgagtgagtggtttgctttctggtgaggctgaaacaacttttggcatttggacaacaggattagttgatggaagagagagccaccatactgaaaatacaggattaagttaaagtcaacatatttaatggtgagaccagcagtccctcttcaccttcttggctcttaagtttctatcctctgggcagtagattataaatttattctcctgagagcctacctgcaatacgaaaactatttttagtcaagttttattgctataacaaaataccatagactggatgccttataaacaacagacctttatttctcaccgttctggaggctgggaagttcaagatcaaggcactggcaggtttggtgtctggtgaaagctcatttcctgtcttctcactgtaacctcacaaggcagcaggtccaagggaactgtcttgggcctcttttgtaagggtactattctcattctggatggctttggccttatgacctaattaccttccaaaggccccacttcctaatgtcatcaccttgagggtgaggatttcaacgtataaattttgcaagaacacactcagatcatagtaacctacaattaatgatatgtaatgatccaccagtgaaatagccagatctgtgcctaatgaccatatattgaagcccaccaagtataagccctacatacgcacaaggaatttccaaaagcatttaatgcctcagttttaagagacaatcaaggatttccagatatttgaacatgtctcaaagatggaagacagaaaccaacataaaaacaaaaagcagaaatattgggaaaaaaacaatagccacataaatgaaacagaaatctctgcagaaagagagacaaggcatagaccttaagaaaactttttaaagatagctataaaattattatctcacagtgagactagtcactgtattcataagaaagaacaagagactatagaaggtggtatttccgagaaagataagggttatttaaattaatagtatagcaggttaagtttttaaattcttaattgtataaatttatgggttaccagtgtaattttgttatatgaatatattttatagtggtgaaggcagagcttttagtatatccaccactggaataacatacatggtatgcatagcagttttagagcaatgaaactactctgtgtgatactataatggtggatacctttcattatatatttgtccaaacccatagaagatacaacatcacaagcaaactctaatgtaaactatggacttcgagtgttaatgatatatcaatgtatgtaagtcagttataacaaatgtaccactctggtgtgggatgttgatagcggggtaggctgtgtgtaatgaggaagggggccagagagtatacgggaaatctctgtactttcccctcgattttgctataaatgtaaaattgctttaaaaaatcaagtctattaaaaatgaagagcagaaataaaagttcaaaagtagaagataaatttgaagaaatatctcataaagcagtataaatagccaaaagcatggaaaatgggagagtataagaatcttagaagatcattctaggtaagtgtttcacaaatagaggtgattttgtcctgcagaggacgtttgacaatgtacggagacctttttcgttgtcacaaataaggaaaggatgtactactggcctcttgtgaagagtgacgcaagaggaatgcaccatgcagccatccacaaccaagaattactcatttcaaagtgtcaatagtgtttatgtttagaaaccttgttctatgtaatccaacattcaaataatagatgttaaaaataaaacagaagagaggcaactgtggagagaaaattatcaaagaagtgacaacatcagttttcttagaactgaagaaaatgagtgtccaggtttaaagggcttactaaatgcccagcacagcaaatgagctaaaaatctacaccaaggctcatcatcataaatttttacaaaaacaaggacaaagagaagttcacagatcagaaatcagaatggctttggacttttcagcaatagccatggaaaatagcagaaaggaacacttcctttaaacttctaggaataattaactttggctttgatttcatatcctatatgaaattatgttcacaaattctgtgatgctcttctattcaagagttacagctaaatgtccctgtcattgagtgtggactagattcagtgactcttttgtgatgatatgtcatttccaagtgtaggttgtagaaagactgtggtttatgtcttgtgttctccatccacgcctatctctctctgtgtctctctttctctctctctctctctctctctctctctcatgcattgcttcttctgtgggaacacatgtcatgagcagccctatggagatgcacgtatgctgagaaactaaggcctcctgcaaagagccacaagaatgagcttagaagtgcatcatttaacaccagacaaatctcgagaggctgcaagcatagacaacagcttaactacaacctcataaaataagctatgccagtcccaccctgctaagccactctcagattcttgaccttcagaaactgccaaataataaacatttttgtttttaagctgctaaattttggaatgacttgttattcaacaatatataaattgtacaccctgataaactataaattgtgcggagaaaataattttcagagatagccttatgtactcccctaaaccttttttccccagaaatctattttcaaaaatatactctaccaagtgaagaaagaaaccaagaaagacaaagaatgtttagttgtgattggagatcagaaggagagtgttttaggcatgattcgccttgttatgctgcaataataagcaattccaaaatattagtggctagaaacacaaaggttgattttgtatctttgcaacatatccaacacaagtcagtcaagggttctgatcattgtagtcactcaggaatctaagctgattcagtctctagtattctatcattctaccgtaacaataagaagctttagcgttcaccatgtcagtcaaaaatgcgtggaaaattttaaactgactcttacatgcctctatgtaggagtgatatatgtcattttcatttcacttcatcatccaaaggaagtcacgtggtcatgcctaactctgaggggacaggggattataatcactaatatttttaagagaggtaagagaattaggaaaatattggagcattagtattacctgcaaagcctaggatccggaaaacagagaacccaacgtgggaggaagatgcaaagtggtgccagaaagatggtggaggagatcctgtaacaacagctgtataacagttgtagagagaaacctgtacagattggagaagaaaatagtgctccaggaattttgttaccaagaaaaaaaaaatctaatgtattcgaatgtattgagaggtggtattcttattgtgtaagagtataatatatgacatgtatgacagacagaagtaccatttaaaattttattaaacataagaattagatccctatctcacactgtacataaacataaaaatggtaaattgatggattgcctaaacatgaaaggcaaagcattaaaatatataaaaatattttggggcatgtagggcaaaagaggtgtcccttaagcaacagcacaaagcaaaaattgtaaagaaaaagacatatatttgatcattttaattaaaaacctgtacaatgcaaagacttcataaacaaagaaaagacataggctcagatagtatatttgcaatactaaaacaataaaggatttatgtcataatttaagaaaaatatttacctatcaatagaacaaaataaaaataacctaacaggaaaatatttttaaagtttaaaaaataatagacagttcacagaacatctgtatgtcaaatacacttatgaatagatgctaactctcatttattattggaaaaattacttcatattagtcggttttcatgctgctgataaagacatacatgagactgggtcatttatacaggaaaaaggatttaatggacttacagttccacacagctggggaggcctcacaatcttggcagaaggcaaggaggagcaagtcacatcttacatgaatggcagaaggcaaagaaagtcccctttataaaaccatcagatctcatgagactaatttactatcacgagaacagcatgggaaggacctgcccccatgattcaattacctcccacgaggtccttcccacaacatgtaggaattcaagatgagatttgggtggggacactgccaaaccatatcgtactaagtgagataacgtactcccatcggactggaacaagtaaaaaataaaataagattgtgaaaggtcacaaactctcattcttgtagaaatttaagttggtacaaccaatttagagtgtaatttagcaataatctagttaaactgaggatggcatgtcctaccaaacagcattccagttaatcacattgaagatagcatgattgttctcaggcttccatattttctgttgaacggtaagttgtcagtctaattggcattcctttaaaatagacttgtttcctcttgatgattttcacattgtaattttgtctgattttcagcacttcaccggtctttaaatgattatgtaagattttcattgctgaggaggaaatcctatcacctcaaatactatcttattagttatattttcattttattttaccatgattttaaatgaattccttaaaaaattaggttagagaactaataaatgataaagagaaaaattattcttcatcctgatagctgttatgtgagggtggaatggtatggctggtttttttcactgtcattttgtaacttggaaattcttattttttaatacaatgacaatattttcatagttaaaaaacactaaaactaaaacaatagtctgttaatgacaaatttaagggcgatttcattaagttaaaaatccatgttaaggcattataagatgaataaatactccaaatgaaaacaaagtgaaggccacttttatttaccttttgtacatgatacttatttttcaacagttgtcatgttagaaaaagttgaaaaaataaaacaagatacacccccttttggcctctaaccttccaaaattgtaatgggtagacttcaaattaaatatctaattcgactcctttccacttctaccctcatagcattagagacatttggaaaaatgaaaaaaatatagtattttatggcagggtacctcaaccccagagccacagacccgtaccaatccgttgcctgttagggacccgattcgcaaagcagtaggtgagcagcagcgggctagggaaggaagcttcatctgtatttacagctgctcctcatcactccatttctgcctgagctccacctcctgtcagatcagcagccacattaaattcccataggagcacaaaccctattgtgaactactcatgcaagggatctaggttgcatgctccttatgagaatctaatgctgcatgatctgtcactgtctcccatcaccccccagatgggaccatctagctgcaggaaaggaagctcaaggctcccactgaatctacattatggtgagttgtataattatttcattatatattataatgtgataataatataaataatgtgtgcaataactgtaatgcacttgaatcatatggaaaccatcctccaacccggtccacggaaaaattgtcttccacaaaatcagttcctggtgccaaaagggtcagggaccactgttttatgggataagtgaaagctggatttgaatccaactctaccttttacttcccatgtgaacattaaaagatgacttaatgtctctgaatctttttttccttctaagtaataactaccttgcagagttattacttgaattggccataaggtaaagaggacaccaaatacagtaaataataacataataataaagaaaccttatgaattctattcagtgatatccatattgaggtatttaaggtgaatgatactgatgtcagcagtttacctggatatgcatcaaaaatatgattgattgatggatggatcggaggaaggaaaagatatgtgatcaaaacgagtatagtaaaatgttcatggtggaatctagatatatagatatcacttgtaatttttaaaaatgttattgcatttttgaaatttgttatgttaaaatattgggtgaaaattctgatgccctggccatgtcccaaatcagttgaatcagatctctggtgtattttttttttaagatccttggatgactccattgtacagcaagtttgcaaaccactattctaacttctcaccacccccttctttatagcttacaaaattatatttttaaatgtcaaatgtcacaatttcactttccttcttcaagaactgattagacttctagcttctcctatgctctcatcttgcataacgttcatttgcacgtggttaaaactgataggcaataaataataacccatctgtcttttcctgacccaacataactaaaaccttcctttcaaggcgaaaatgaactataatctcacagacaagagtagctatagacaactaattctttctggtctctcgtggtcatgggactattcaccactgccgtccctgctgtctatttggtggaccagccagttttactgtgacccataccatggctcttgagaagcatgaagctgccgaaatcgcagttgtagggttaatggaaaacatggtgaagtatagcttacatatatatacaattttggcacaaaatgaagcctaagaaattgtaccgggctgggtgtggtgactcatgcctgtaatcccagcactttgagagaccaaggtgggcggatcacctgaggtcgggagttcgagaccagactgagcaacatggagaaaccctctctacttaaaatacaaaattagccaggcatggtggcgcatgcctgtaaccccagctactcaggaggctaaggcaagagaatctcttccaccctggaggcataggttgtggtgagagaagatcacaccattgcactccagctggggcaacaagagcgaagctccgtctcaataaataaataaataaataaataaataaataaataaataaataaataaaagaaaaagaaattgtaccaggaagtggattgggaatgctctatatattctccccctccaagaagtttttttaatttattgtattgtgaaagatctgcagctatttattttgtgtggtactcttttgcaataaactacttctgcataaatgaactcaaaaactttgatattcatgaaccttcataatgttgatctagtacatcttgcccaactagcccttgggccattccttccatgccactggttgaaaaatatgctccccaccccagtaacatcagcatcagacctctgcaaccagaaagattccataggtaatgaaatccaaatgctggcatttggaagtcaaaccagtgtattttgaaatggaaaggcaaggggaagtgcatggagcaagtacagcatgtgctacaacttcagttcataccctccttaaaatactgtgcaactaaactgtcaattgcccattgatagagatagtatctttttcagctttacaccttccgaattcaacacactgctagcctcaggactaagcgctcaataaatgtttatcaaaagattgagtaaatgaatcagtggtgaaataaaatgtacaaacacatacgcttcatacacgtttaggaagcatttctagtgagctttgtggatattttatttcttaaaggttctttttctttccatgttcatgttattctttattttttaaaatgttgcttctgcttatttctctttctacggcagctatatttacttgcctgagagcacagcatatactgatgttaatcaaactttagatgaaacacctaaaatgatagaaaagaatctgctctaattaaataataaagcaacccctacaggtttagacatgtgccttccggtgtgggaaagaaaaaatttaatgaatgtagtagttttatgccaagaacatttccctcgtgcacctgtgttttaataagatagaatataaaatagcaaaaggggcccgacttttgtgatgatatttactcataaggtagtaagtcagatgtgatgacattttctttgacttagagctgctatacttgggtcagatttcagttcagtaaatttgcagtgaagttgtctttctaacatggtgtcatcctggaactgccctgctcccacagttacatacaggctagggagtgggtaggagtgggggtgaaatcctcttaatgtttatggtgtcagtagattcaaactaaaattagccttacagccatactcctaataaggggcccctggcatatttaattgatttaacaaatttatcaaaaatagataaactgaaatctgccttgaaattaattactgtatctctatttttataagaaaatattttggacccgttccctctgccttatgggtgcaactcccggcagaataggtcatgtctcctgaaaatagttcttattttctttactacttatgacctcttatagcctagaagtttttccttgctatttctagttgaaatgctaatctggcataatttctagttgaaatgctaatctggcataatttcagaactaattttctgttaatgccacttggaacatctaaattcctcctttttcaataatactatatttgtgtgttgcaaacacacacaaatcatactatatttgtgtgtatatatagtaaattccaacttataaaagtaaaattggaatttttttctttctttggaaaattattttataattgagaattataaatgtcacttttttaaatgctgcaacctttgagattggtttcaataaagtaaaacttagtaaacattaagaaaaatgatagcttgatatgttcactaatatggtaaatgaaaacttttatgtgtgtataggctcttgttaattataactaccttcacaggaaaaacagtcttgtggaaggtaatggtgccagtgagagaaaatagagaaagtagaatagtagtaagagagaaaatagaatttcccgtttagaataaagctaagtaaaaagtgaattgtttcagttttatttatgtatttgtaagtgtggtctcatgccatatatattcaaagatagacagagatcttaatctttaattttttatggccaaagaaaatgagtcccatgtaaaagggacattttcgtaagctgatctcaagtggtgtattttgatttgccgcagcagcctatggaagaaatatcattttggctgcctaagaagaaaaatgtcatacctttctattttttattcatactccgcatatttggaattcgtattctcaccatacttttgggaagataacacgaaattgccttacttgcctcgaaatcaaaatctgccattcgttttaaaataaaatggctttttcatctcattttcctttagcagaaaaaagtaagttaaatttttttgtagctgtgttaagtgtactgttcctccctcgttgagaacgaaacaaagacatatgattccatttactgtaattgttttggtttgcccaattacaatagcagtaaaatcatttacacatagtaaaatgtttgagccttaaagggcaagaagactaaatttagctgaagatatacaactttcatgtgccaatgaggaaatgtataaaatcagttatacatattttcctcattcatagatattgaaaatattcatatatgtgtacatgtatttgataacttaatattttctaaataacagaaattatatactgtatatatatttggatattatgattattgttattgccaccattgagcacttactatgggctcagaaaacttcactgtattatttttaattcttataacaaccctgtgaaatatatattatgcctatttcacaaatgagaactctgaaatcaggaaattaaatcacttgctgaagtttacaaagcactgttaggcaataaaacagaatttcaaactcacgtttgcttgtcttcaaattttgtatgctgtacaacctgattgttttactacttgttcttaatttcaaaaaaaatcttcatactaaaagatgatactttgggagttctaaagaacatgtttttggccgggcgcggtggctcacgcctgtaatcccagcactttgggaggccgaggcagaaggatcacgaggtcaggagatcgagaccgtcctggccaacaaggtgaaaccccgtctctactaaaaaatacaaaaaattagccgggcgtggtggcgggcgcctgtagtcccagctactcgggaagctgaggcgggagaaaggcgtgaacctgggaggcagagcttgtagtgagccgagatcgcgccgctgcactccagcctggttgacagagcgagactccgtctcaaaaataacaaaacaaaacaaaacaaaacaaaaaaaaccatgtttcttttcagaaggtatactcatttgaagtggataccaattatttgtattaaaattacttatggataaatttgaatctgcaaaaattaagtgcaacattattttttggcacctgttataggaggtaaaaatggtgattcaatatagtttctacccttagggagcatttagtgtggtttagacgtaatgacactaatgtaaattagagtagaataaattctttaaagcaggacaaaaggagtgttaaagactacaaagtttcagttatggaagataaaattctggagatctattatacagcatagtgcctatagctaataatgctgtttcggacacttaaaatttcctaagaaatcttatgttgtgttcttaccaccagtaacaacaataataaaggggacaagaggaaattttgagtgatgacagatatgtttatagccttcatggtggcgatggttttgtgggtgtatacttattcccaaactctttgattttatatatatatatatatatatatatatatatatatatatatatatgatgaaactctttgagatatatatatatatatgtaaaatatgtacagctttttgtatgtcaatcatacttcattaaggtggttacaaaaaagaatcaagaaaaataatcaccctaataaaaagagtgttattaaagaggggagggattacttctaattggtagtatcagaaaggttctcatggaggaaggtatagaaaaatttaggacaatataagcaacgatactttaagaaaaggaataatataaacaaaaataaaccaaaagatgaagaaccaccaaggatgtttctgaaaaatcaagagaaattccattttgatttgagagtatgaggtacttgtcatgatatataatgagaagtgtctagaaatatgttattttgagcaaatgctgcttagaaaggaggttaggttatttattaatccattcctttgaaatataaatttcatgatcagaaacacgtgagtgtaactatccaataacaacatgatttatttccaagaggatagtatattataggagaagtaggattttttctctttcacaagctaatacagtgtttactgattcaaatgacacttaaaaaaaacaagaaacaaaaaacatacactataagctatccttattcagctatgttattgtcttgcattcctgattagaaacatacaagttagactcccaaagtctcagttttctcatttgcaaaatgaataaaatgatagtacctaccccaaggtgctgtggagtatatttaatcatgtacttaatctgaagttttaattagagtgcatagcatatatttgtggttgcttttgctcctatttctgggtaaaagttcctacacctattatatatgttttgtgtttgaatgaagagaaaggcatcattatttcaaatatcccctctagccaacaaatgaaagctaagacttggaagctaggatgtctaacaccatatcctcttcatgtggactatatagtagaggatatgtaaattaagactcaattaaatgctcacattttataaaggagacccttgaatatatcaaatcctcagagagtatgtcagtttaaacttattaagaaatttaaattatttaacttagcctgctgagtcagtttctgtagctgatttctccaaaaggtcttggtattaaaagtagcattacagatcactaatagcaaactatttctgctactttgggtatttttacagggtgctaattgtgccaaatcaagacattgaaattgcataattttaggttaatattagcataatcctacatattttttcagaagcagtgcaggaatagtacaccctgaatatttttccatcatgatggaattttcaaatatcacaacctttacattgtcagttgtctgctggaacattatattgtgtcaaagagatttataaaagagaagggcaaagaaaatttgcggagttctagacaatagtaatatcagggacacttttgctttctttgttattactaaggagttaaataatcagataccaagcataggtaaagaaatgaatctctaactatttgagtacttatcaatttatctcaaggatatttacggtgttttcccctaagccaaaatagagtgcttaattaaggtccccttagccccctaaaaatcactcaggccaagtttctgatatgtgtgtatacttatatacatattaaagtatatgtatttttgtgtgcactttcagatcaaaaagtcctcgtttatctaaagcaatttcagcttattgatgaggcttttctgttacagcgtcctcctccacagatctgcctgtctagagatttaagcccaataagagtccagcaaagtttaaacaacactttagaaatctaaagaattttaagatttattttaatagtcttagtgataacctgaattgtttgtgagttcttacaaataatgcaatcaacatttaagtaattttattatttttttgtttgtataaatttaaggtatacaagtacatttttgttacatggatatattgcagagtggcgaagtctggttttttgtgtacccatcatgcaaatgatgtaccttttctccattaagcaatttcctatccttcgcccccatcccaccctctcgcccttctgagtctccagtgtctattattccacactctgtgcgcatgtgtacacattatttagcttccacttgtaagtgagaacatgcaatatttgactttctgtttttgagttattccacttaagatgaccaccagttccatccatgttgctgcaaaagacatgatttcattctttactatggctttgtagtatttttcattgtgtatatgaaattgtttattccatacgcaatttgtgtgtgtgtacatatatatatatatatatatatatatatatatatatatatatatatatgcttagacttagaagctaggatagacacacaatggaatactacacaatggaatacattcattcacacacatataaataaaagaatatgtggagatatatctccacatattctttatccaatcatctgtttttaaataatgctattgacttctttagggtgaattttatcaatattgttttggtttaaaacactcaccttaaaagagtcacagtccctaaatgtgcatcctcatatttaaattaggtctcagtaaatttgtgcaaagtgtattctttttaggatggtgttgaacttgctaaattatttatctttaagaatcatcattttgtgtcttttattaatgaaaacaacaattatgtgattgctgatatatttggaaaatgatttctgatgtagattgatttttttattctaaattctgtgtcggtattaaaaatttatagattactaactgtattaatatcgataatactaaattttattgctatttataacttggagtgtactttcatcctcctgaaaaagctgaatgaggtaggcagtattattctgggtttatgtgtgagataactgagactcagaggtaaaatagtgtatccaagcattcatggctcttaaatggaagatataaggggtttgtgaaattactcatggacttttttattcattcattcagttattaaaatgtattcaacatttatcatgtaccaggaacagcgcttagtaccaggaattcaaaggtgcataaaacatcttccttattctaagaggtacatagtgtactggaacaaacagccttgtaaatacataattagaacatgaagtagtatgttaatagaggttttcacaaagctgtggaagcttgtcttatgaagtaactaattccaagggagagaagccttatggaatagtgacattttagatagggtgtcattctaaaatacagcaaaaggcccacagtaaaaaaggaattttggttgttatgaaaattttcagattttctatgttttcagtacagtatacatggtgggctatgtgaatgtttgtatagggaccaaagtaggaagtgaggttgtctgttagagagcgctgagaaaccgaaaatagggagagatgagttggaatatgctgaggaaaagttattaggagttttcaagaaaggccacgacagtggggctagagagaagaggctaaattaaagagtcatttctggtttagaattgataaaatatagagacaagcatgataagaaagaagtcgagaagtaaacgatggtctcaagatttctagcttggaaatcattgactaaaattaaaactaaggactggattaggccattcttgcattgctataaagaaatacctgagactgggtgtttataaagtaaagaggtttaattggctgacgattctgcaggctctacaggaagcatagcaacatctgtttctggggaggcctcagggagcttttactcatggtggaaggcagagcaggtgtaggcatttcacatggcgaaagcagagagagagagttggtggtgggggtgggtggctacctacttttaaacaaccagatcttggagaactcactcattttcatgaggacagtaccaagaggatggtattaaaccgtgagaaaccaccctgatgatccagtcacctctcaccaggccccacctccaacattggggattacaatttaatatgagatttgggtggggacacagatccaaatcatatcaaagacttgcatgggaaaataaggaattgttgacataacatctttgaggttcacatcaaatgttctgatgaggatagtccaagtagcagttggctatatacctcagataagggctgaaatttggagctatgtcataatcagcctagattaagagtcaataatctcctgcccatgggccaattacacccaccacttgtttttgtaaagtagtattgaatcccagccatatccatttgcttatgctccatgtataccttttttttgaacttcaaggcagagttgagtagttgtaacaaaaaccatacggcccacaaagcctgaaatatttgttctcaagatctttatctataaagtttgccaatacctgctgtagatgttagttgaagctttgaaagcaaatgaggtttcataaggcagtgtccatacaagacatttaacaagtttacctataaaaactagaattcctttgaggggaacacatcctagtctccattaagcacagtagaagagtcccctataatgggaaagaggtcactttaggtgttgatgttggtggtacaggtcaaagaaaatttatctttgctgtttattcagaatgcaataagtgaagttatgagaaataagggaaaaaatgtgtagaatttcaacagcgaagagaggggataaaggcatgagaatgagttcctaagctcaagtattataaacactgtgagaaacttaaaatcaaagtatgactccaaacgtatttgaagcctgagaacaaggctcacaacctagggaggattagggatcaataaaatagagtgttacaaagtataatgtcaatccagagttgtaaaaatatcagcattgaatatattgaaagcagtaaaactgaatgaggagactatcattttatatcactgtgtttatttctttgccttgttctataaatatttaaaattataaaatttttattaacagtgagagcagaactaccagagtgagcagatcaaaattgggacagatgcttttcactgcacacacttttatttttctgctgttcatgcattatcttgtacagtgcacatgttttacctaaaaaattaaaatggagtctcctgcttaggaaaaaagtatatattctgtttcaaactatatacaaaaataaaatcccaggtgactaaaaactgacatgagaaaaaaacaaattgataaagcttttacagtaaaatagaggagaatatgttaattaatatagggtaagaaaaaattgcttacacaaatgatgaagcactaatcatgaataaaaataataaagtggactaccttgtatattaataacatctatacatcaaaagacagcactgagagagtaaaaatgaaacccacagagtaggataaattatttggaatacacacataatggatgaaatgtgtgtattcataattataaagaattcctacaaatctttcagaaaagaacagataatccaatagaaaaatgggaaaagttcttgaaaagtgaaccatggcacaaaaagggcttgtggcctgctggcaatattctgtatcttgacctggatggcatttttaaggtgatcactttatagtaaataactaatgtgttttatgcatcatagtaacgttaagatttttgtcatctttacaaaataagaaatccaaacggccaataaatatataaagaatttctaagtcccattaatggtccaggccatgcaaattaaaactaaaatgaaatatcactgcttaccaaccagaatcattgaaatttataagtctgacaattccatgtggtggtgagaatatacagcaattagaaatttcacacaatgttacttggtctgtgaattgtaaatagaagtgtaaaattacactactgcttcttggagtgaaatccatttggcactatttagtaaattcaaagatctgcataacctatagcccaccaatttcacttctatatatacactctacagaaatgcatatgttcatattccaggagacatgtttgggaatgtcatagcagcatagtaatagccccaaaccaaaactacttcagtatttattaatagtaaaatttgctatagtttgaatgtgtctctttccaaattcaggtgtcgataatgtgctagtactaagaggtagggtgtttaagtggtgattaggccatgagggctccttctttgttaataaaaataagacccttataaacaaggcttcacgcagcattcagtcagcttgctctcttgcccttctaccttctgccttgtgaagatacagcaggaaggccctcaccagacaccaaatgccagagcctttatcttggacttcccagcctccagaactgtgagtgaatacattggtattatttgtaaattacccagtctcaggcattttgttataacagcacaaacagactaagacaatcatacagtgagaaattaatcaacaactaataagcaaagaggtagattaatcttgaaactatgatatagagtgttccatttggctgctggaagttttatttcttggtctgggtgatggtcaccatgggtttatatgaatggttccctatattatgtttcacaacaaaaagcatttaaaaagtaaatatatgtaatgtactcagggataggcatggccaaccatggattctatgctgaaataatgattcagatttcatcagcaggctaatgacactgcctatttaaatactttaagtcctgaaattaaagaaggtaatttctcaagaaggaatttctaatttatgggtgggtctattccccaccagagagacactagcatggctcagattctatgttggtcattttatttgcatttaaagtcttaagccaaatagaggtacactaataatgacaacaactactactactcatacttgtggaacactgccagatgctgttttaagaaatttgcattttcatttgtaactgagcttacttgaatcttctctctttttttcttggttaatctaactactggtctatcaattttacttatcttttcaaagaatcaacattttgtttcattgatcttttatatttttgtttcaatttcatttagttctgctctgatctttgttatttcttttcttctggagctttgtgttggctttgttgttgattctctagttccttcaggtgtgatgttaggtagtcagactgtgaactttcaggctctttgatgtaggcatttggtgctagaaaatttcctcttagccttgcttttgctgtatcccagaggttttgaatagattttgttgtgaatgtgatgaaaacggaacatttgtacactgctggtgattgtaaattagtacaacctacatggaaaacagtatgaagatttcttaaagaactaaaagtagatctaacatttgatctggaaatctcactaccgattatgtacctagaggaagagaattcattatatcaaaaagacacttgcacgcatatgtttatagcagcacaattcacagttgcaaagatatggaaccatcctaagtgccagccgaccaatgagtggataaagaaaatgtggcatatattttcatataccgtgaaatactattcagccacataccatgcaatactactcagccgtagaaaataatgaaataatgtcttttgcagcaactttgatggagctggatgccattattctaagtgaagtaattcaggaatggaaaaccaaatactgtatgttctcacttataagtgggagctacgctgtaggtacacaaaggcagacagagtggtagaatggactttgaagactcagaaggggcagagtgggaaggtagtgagggataaaaaattacctttggggtgtaatgtacactacttgggtgacacgtgcactaaaatatctgattttacttctatacaattcattcatgtaaccaaaaatcacttgtattccaaagactattgaatttgaattttttaaaaacattaataaaataaaagatgtaaaaaaagaaatttatatatactcatttattgagctcccacaattaaccttaggaggtaagtacttcataattggtagtatacttatcttttactaaatatttgtattacttgggaagttgagggttggggagaagtagcaaggtactatgatttggggcagataactaacttatttattcgcacatacagtttggaccatgagacacgagctcaggtccctcctcctcacctaatcaaagatgaaatatgtgggatgggatgaaataatcagcagtccaatgctgagtttccagaccgaagtataaagcaacaatggatatgtcagaagtctactagggtgttatttatttaaatctatttcatggaatttactaccaccttaatggcccgaaagtgttaaagtatgccccagagtaccgaattactccctaaatgtaatttatgcttgagaataatctgactaacttgatttagaacatcagaaaataagttatgctgcacataaatgaagcagcagtgtaattttaaataccggttgcacggtgaatgagaattttaatatttgcaaaattctaaaatcacttgatttattatccttatgtttatactgacatttttttgccctttgttaagttccatccatatttcttcttactgccaagaaaaaaaactttttttcctagaaatattacagaaggcaaaaattatatttgtttccctgaatgctatttttgatgtctctacttgtttctcattgttaccatttgcttcattcatgggcagcccaattaatggagcgagacaaatttagggagcacagtgactaattagatattaaattggtaaatctaactttgtaaaaccagaaaaaatatatatatatttttttcatttggaattttccttggtggaaaagagtttaaaagtagtcatgataaaaaatgtaattttacgtagtaaattcaagaatagatttagactgtgctattaacagcacctattaaatactgaaaagtgtattttaaaattttatgtgaggcttgaaatggagtctaaagtattattactcacattaagtgtcatcacatgtaaagcccatgattttattctttaatattttgtttgaatagttacttatttcaacagtaatttcaataataaaattaaatcaactttacagttttcaaaggtttagcagttgcatgctgtaataaatacttcatatttatatatttataaagtgacagcataagtcatttttattaggtccttgaggatgcaaaagtttggattatacgaggagacgagagaaaaagggaagaagggcatttcagaaatatgctaccgatatgcaaattcacaagtcctaagacagtagcaggggtcgggcagaaagtccatcctgcctccctcttgtgggcctggaacaatggtgtaagtggaaggcctgttccccttctcttcctacctccagctctgtcttacagagctacggataccatgagcaagtgtatgaacccttacggttttcttctcttgggagaatgtaaaggaaagataacttgtagaaacttgtagataacttgtaaaaaggaaaagaattcagggtgagagggggatttgttgaatttgatagaggatggcaattaccaatatgatgagtgattgagaaacaagtctgtgcaacaggtttgaaatcgaaaatctttgaggtgtacaggatcctgaaatgaagaatgggcatttatagcagtatgtcagagaaacagtcacctcctagtagctaaaagtgttggcaaaagtatagttcaagtgattgggtaggaaaaacagcaaaccaagagtggagactgatggttgctacaaaggtggagtggtaagtcgtgaccaactggtacttctctgtgctctggttagctgctgactgtttctcagactgtggtagcaggaggagggttggagttagcagtcatttgcatatgagactgccatttaaaaaaaaattttaaattatttcatttttctgactctcaatatgaaaagcacattgtagacaaattgaaaaatatagaaaaattatataagaaaatatagtctcaccagtatggaacaatgctaactatgttgcatagatttttagattctcattcaaaagcaactctttgactccagtgatgcaaatgcatgtaacatatgcaatgtgcaattcatttttaaagggaataaacttacgatatattcataggtcatttattgtgtgttatataccattgaaaatatatgaatgctaaattattagtaaacatgcaaaaacattggcaagatcattttgttgtggaaggatatattgtatctgaataactctagaataccataaatcatcaaaggcaacattcttatttttcactaactacagttagagaatacctcttcggctaccttcggttgccttttttatgctaccaaaatgctgtctgttttacaagattttaaaggttaagcatataattattcattaaatacaatgagtgcaatgtacatgtagatacattattaaattttgggtagttaataaaaataaggggaaaaaacctctagaactatcacttttaattgtttaactgataaagtgaagcttcatcttggaaaaataatttcacaagagagcatgtgcactggtagaaaagtgccattgaaacaagagatatttgggttagaagcctctctctactatttaataccattttcaccttttggcaaattacttggcctctgttttctccaatggaaaatgggaataataattgttatgctgcagggttattgtaggtgtcaatgaaatgatgtgtctggcactataaaagcacagagcccggtgcctggctattagtaactgtttaataaatgttaattcctttctctgcccaggacatcagtaggcagatgtagcaatttaaaacttctagtgttactttaaattcctgaatgaaggtagaggactgaaaagatatcatggtattcaaaagtatgatccattgcttcttaagaatagagttcagaaaagcttgacagattcctgtactctgaggcagcaccatagccggtaatctgtaggatggctattggttttgtgctcacaaatgcttgcttgggcaggccccaggaaatctggtagactgtaagcccagtaagatttcaaatcttactttacggcagtgtttttcaccttgactgtacattgaaatcacctggatgctttgaaaaataacagcgtcagtgtccaacctccagaaatactgattaagttggtctggaatggagccccaggatcactgtttggttattgttgttgctgtgttttaaatgccccagttgattcttatgtgcaactgtcttaggtaaacatacagccctggttcatattatttctgcctcagtctcttttatgactggaaggtgaccaaatgcttgtttcctaatattctttccatgtgtagtattaacacatttgacttgtactaagttcctgcagtattccaatctaaaattttagtgactacaataaaataagaaggattaaagaaggcatcgcatagtttagtatatcggttatttaatgcttacatgtgagcctacaatatgaattatatctgtcatcttattttaaatattgacagaatctttaatgatagtgacgaattattgatttattggtgtgataatggtattttagttatatttttaaagttttatttgtaataactatatgtatttatggggtacagtgtgacgtttcagtgtaatgtttcattgtgtaatgatcaaatcaggtttcttggcagatccatagcctcaaacatttataatttctctgtggtgagaaaatttaaaattctctttcactattttgaaatatacagcacaatattggtaactttgttcatattactatgcaatagaacactagaacttattactcctttcagttgatgaacaggcagttttggatcaagaataatattgaaagtgatagaatttatgaagtaatttttatccaaaaatattttgaaagggaatatattgcttccaaataatttattacaatgttaagatatttgtaaatttctagaattaaaaaaatatatttttaggaaagaaaatgccaatagtccaaaatagttgctttatctttcttttaatcaataaatatattcattttaaagggaaaaattgcaaccttccatttaaaatcagcttttatattgagtatttttttaaaatgttgtgtgtacatgctaggtgtgtatattaatttttatttgttacttgaaactaaactctgcaaatgcaggaaactatcagagtgatatctttgtcagtataaccaaaaaatatacgctatatctctataatctgttttacataatccatctatttttcttgatccatatgcttttacctgcaggcgatttgacagatctgttgagaaatggcggcgttttcattatgatataaagatatttaatcagtggctaacagaagctgaacagtttctcagaaagacacaaattcctgagaattgggaacatgctaaatacaaatggtatcttaaggtaagtctttgatttgttttttcgaaattgtatttatcttcagcacatctggactctttaacttcttaaagatcaggttctgaagggtgatggaaattacttttgactgttgttgtcatcattatattactagaaagaaaattatcataatgataatattagagcacggtgctatggactttttgtgtcaggatgagagagtttgcctggacggagctggtttatctgataaactgcaaaatataattgaatctgtgacagagggaagcatcgtaacagcaaggtgttttgtggctttggggcagtgtgtatttcggctttatgttggaacctttccagaaggagaacttgtggcatacttagctaaaatgaagttgctagaaatatccatcatgataaaattacagttctgttttcctaaagacaattttgtagtgctgtagcaatatttctatatattctattgacaaaatgccttctgaaatagtccagaggccaaaacaatgcagagttaattgttggtacttattgacattttatggtttatgttaatagggaaacagcatatggatgataaccagtgtgtagtttaatttcaacttgtggtgtcctttgaatatgcaggtaaagatagattagattgtccaggatataatttggttgctaaattacatagtttaggcataagaaacactgtgtttattacacgaagacttaattatttttgcatcttttttagctcaaattgttcatgttgcaatagtcaatcaagtggatttgaattgtagccaatttttaatgccagaaaatactgattaagacagatgagggcaaaaaacacccagtagtttattaaatactttagatatttcaaaatgctggattcacaaaagcagtatcacatttgactttacaagtcttcattctcaaatatgtttccatagtaaatatgccctttaatattaaggagttaagcatttaaacacctatttatatgataagctatttaaacacagaaaatatttttaaaaccttgtgtaattatatgtgtatcaatcaaacttgcatgcacaccagcgttggcatttgtatagagaggaaatgtatggattcccaatctgctttaatatagaagatacattttaaaaatagcactgaagtgaattttgggctaatgtagcataatggggtttctgcctgagaggcagaaacatattagagttatataaaatgttttggggtagatatagaaaccacttgccattttcaatgatatccaacccaaggtagttatatatttcaatttatattttattatcaaattagtacttattgtgaaaaaaatcaagtaacatagaaatttgtaaaagtacctccattctactctttggaggatagttgttcagtatgaattttgctacatatttcaggctgggtttcttggaaagccattgtaaaatggagatttgtatgtagaaggttaactagggagtacttttacgatgaagcaatttgttttgatgtaacttggtgtagttttcttcatgtttcttgttcttgaagtcagttaagctcttgaatctgtgcatttaacatttcatcaaatttagaaacctttcaaccatttttttaaaaaaaatggaactccaattgtacatttattaggctccttaaagtgccccactactcactgatgttatgttcattgtctgtttggtctctcttttctctgtaatttgttttatataatctctattgtcaaattgactaatctttttcaaagtctaatctatggctaatcccatgtagtatatatttttaacatcagacattttcatctcttagaagtaaaagttgggtctttttatttcttccatgtgtctactcaacatgttcagtctttactttcttgactatatggaatacagatataataactgttagaatattcttctctactaattttatcatctgtgtctattctgggttaatttaaattgatttatttttctcctcattaagtgtgttgtttaactgcttctttggatgactggtaatttttgactatatgccagacattgtgaattttaacttagcgcgtgcttgatacttcaaataaattcaaatatattgaaataaatattctcaaacctcgttctggaacacagttaattcacttggaaacaatttgatcttttgagaatcttccttttatgctttgttatgaccagaacagtgtaagtttagggctactttttccccactactgaggcaaaacccttctgagtactctctctgatgtcctgtgaatgataaaatttttcactggggctcgtgggaacaggtggtattactagccacgtgtgagctctggtgattgtttcctttaattcttttgtgaagttctttccttagctttgagtggttttcttgcatacatgaactgatcaagactcagatgaagaataaaataaagctttctacaaatctccaaaatttcctctgtgtatatatcacctctctggtattttgccctgtgatcactagtcagccttgggctgctgaaactctcagcttcatcttttaacaaaagcctcctggcaaggatcactgtccttcaatgtctgatgttcaatgtgttgaaaaccgttgtagcatatattttgtctttttttttttttttttttttttaagtgtttcaggtgtttcaggcaggagattaagttcagcctcctttactccaacttgaaaacaagtccaaaacaaactattttgatgtaatttgatcttttaatacattaacattacacaattttgtgaatatatcataatttaaaattttcagagaatgtctaatggtcctcatttcttgacagtgtggtttagttgaaactgatgaacattttatcaaaacttttcccctcaattggatacttttttttttttgagatggaattttgcttttgtcacccaggctggagtggcatgatctcagctcactgcaacctctgcctccaggcttcaagcaattctcctgccttagcctcccgagtagctgggattacaggtgcccacccccacacctggctaatttttgtatttttagtagagacgagatttcaccatgttggtcaggctggtctagatctccgacctcaggtggtctgcctgtctcagcctcccaaagtgctgggattgcagacgtgagccaccatgcctggccaactggataattttaaaaagaccattttatttagtctattttttctcaatctatagatgagataagaaaaatcattctagatgtccaaggaaaaattctttcagaaaagagctgtgaatgatatcacaaaccccccaaacagttaaggtatttctttcctggttattttatgtccaaaatcatgcatatgaacatgtgcacacacatgagcgtgcacacacacatgaatacatatacacgcacataatgtaccttaggttatctttccattctgagtaattatcgtaaaatgggtaaaatcaaccccgtaagataccttcatcgataaggcaaatcaaagctttggtaatttctgctatcttggcctttgttgattgactaataatgaataagagaatgagtttcaatatttactatgaaattattttagaagacaggatgtagacagtggctgttagcaggcaattgtttggcatgagccagtaatggttactgtgaaaaaaatcaaccaagcagcccatatattaaacaaacacacgcagaagcacgttggagtctgaagcctcatatgtacaattttcagtaaagaaataacttttagatatgaaataaacaaatagatatatgttgtaaacttgtccctatgtattttgatcaaattgcatcatatttttttcactttaaagaagagaatttagtgctttaactgagacttagtgttatcattcaaaatatactgactgccaatagcagtagaaagataatctggttccatgcaactctattttttttcctctgtcgcaagtaaaagacaaaattaagtacatgaattagtgctttttgaagatattccagagcaatataccatgccactatggagaacctctctaaaaatatcccatttttttacctgagaaaaatattgatcatgttatatgccactcaaattggtttattaaattcgttgaatgatatcagcatctcttaatgcattcactaaacaagcagtaattgagtgcatatacaaagttttatcatccaccaaaacagtgacaatccacatgaggctctaatagaagtttagaaagggggttaagtggttaaatgctggactcagaaagattggattcaaatcccaggtcctttagcttaatagttgtagaatcttgtgaaaatatcttaattcttttcatgtctctgatttctcttctctaaaatggaaatataaatgagatgtgtataaagccacttggaatagcattttgcacaaaataattactcattaaatgtaagcccctattataactaatcactctttataagtgattagttcatatcaatacaaactaagacttatttactgaattatcgtctctaaacatccacactgcagaaaaaccaacctggaaatttcataaaaccttatttttatgtagtataatttcttctcaaagcataagggctcttggattaggaattgaggaaaattccaattcagccaaacgcatctgtttcagatagctgacacttctgcctactcatttcctagctaacaagaagaaatgttaatgggagttttcaaaggaaaagctgaacaccatgaaggaaagtgacacaaataatgttagctcatatattgacagggtgaatttgtgtgctttcaagtcccttcagtgaaaataggaaagtagaaattataaaatgccctaacatttaaagctagcatgttcttggagactaggaaaaaataagttttaaaacatgggctatgatagaatgagatggaaaatgtttgtagttgccagtagaaacaataacaattaccattagattaagtatttaaaccagctgaatatttttattaatggaaatggcatctgttttatgaaataatgctgctgaatgaaccatattaaaaatgaccagtatttcctgcagaacgttgtcgcagacatacaagcctgagaccctaaaatcttaaggtattccatttgaaatcgaccttaagacattaacagtagtggtattgtttagatgaaattttttaggctttaaatcaacaaatgttaagcagacatggggagcgaaacaccagtgtgttattctgacatgaataaactgctgtttttagggaaaaaatatagtcttgttaaggttaagctaattggttttctggtatcttttgcaatgttagtgtgttttactgctccataacctatgttatatggtaaatgtgcaatatatttatatatgttgctgtaaagaaatgtaataaaaaactgtttactttgtgatatgaaagtaaaaatttattcattgtcattgagcatacagaagtaaatatggattacatatgtcatattttaatgttcacatggtcccaccatcaaatgttgaaaaacttatagtttaacgtcatattctattgaagaaaaatacactcccttttctcaaatgtgaaatgtccagagagaatggaaaattacatataaagcatgtagttatagcatggtgaccctgctgtgatctctcagatgaggaacaaaagggagaaagaaagagcacactggtgctttggagttgagagaaggcaaaaaaagagtacaaaaatgtcaaagccaagtttagctgctcttcagctctccctttagctgctcttcagctttaccttaccatggttattagtgattgaagaaaattctaaagcactttttaaaggacccaattctgaagagtttagattcagagagcacaatggagttggagtgactcctgctcaaaagtttgagacaagcgagtccatgaaaagaccgtcctcctcttaatggaaatacccaggttttctcattcttctcgccttgctttcagcactcgcagcccagaaagcccttatctaacaggtactgccgttgaaaggtcattgacttgtacaaaaatgatgagtgctgaatagatgtgcataggtcactgacagtatctgctacagagaatgagttttcgtatttttattaggatacacctaacatggcaatctactgcctcaaagaactctataggaggtaagtgaatttatattaatacagattgaattaaaggataatctagaaaaaggcatatgatgtaaaaaaatcagacacaagtatattttctgtatagtcagtttttacattgtgatttcaccagctggctgctgagtttgacggcttcttaacagccacactgctgagattcaaatgctgatagaaactttgatggaaaaatcactggagtaaatatttctaccatctgttgcccttcactgggaccctaacgttaagaataattcataccattgcttgtcctttatatttccccagcagtaataaaatttcataagattttgttttgtggtcacaaagctatcctggtttctgtaactagaagacatacactagcataagggaatcagccggaaaatttactgctaagagaatttgtctctagtcacttactttaaggttacagcaatgtgtaagtgtgggaatacattttaaaatgagcttttcaaagttattagctggtagtggcatgagagttaagtctcttaatacagttaaacagttgggcacttcatccttgcgtaaatattgttacccttttattgctgcttggaaactcctctgcaactttttggcccctatccatcttttcagaagtagtaaataaccaatttactgggagtgtggtaccaggcagaaattccgagaggggctttcaatccttgcccatcaagtgtatctttcagaaataagtatattaaaataattggataatttcagtggcttgttattagacttccgttgtccagcatggcatgtttaagaagatgacagattttcatacattattggaaagaagcaagaacaaaaaaacataacttactgtagtaaccacggtaaagaactgcttaaaatgcaggataaacatgtcatccctaagggattcccattcttagagcatgaaattatcaagagagtaagagactacaaaaaatgagaagaatgctgattgcaaattccaaatagaaaaaatcaaaacaaaactgcgcaccatcattctggaagcaatgagaagcagaaattgtcatttaatgaaatgtaagattaaagttaatagaagtaattttcatgaaataatattttgcaaggacgatgttccagccatattgatcttcgtgttttcttttcacatcccttcttactgttccctagaatgcttgtttctacctttaaatttgcttttctctctaccagagggctctaccctatctccagtttctcaccatgtcccaatctactccctctcagaatttttgtacacttccctttatatatatttgtgctctaattttatattcacagatatgccttttgtaactcccccatcttaaagaaagcacacacgtacgcacacatgcacacacacaaaattgaactctttctgggagatctgcttaactttcttcataactctgtcacttgctgaaactgtagtatgtgttttcatgtttattatcttttccattagaatgaacatattttgggtacttggtctttctcgatcaccaatatacctcggtacgtagaaaaattgattcatatattgaaaatgtaatattcagtagaacgaataaatacataaataaatttaaaaatgatacttttattgtattacctgagacaaatgatccccaagtttgtccttgcttttcatagccaaaacattctctcttacattgagcttccttcacctcttctgtgtacagagcacttaaaattttcacattgcctgatactttaacaatatgatggccctgttctcttacccattggagcatatgttaaataccagaacccatgtaacaaacatatattgtgatcctactgtgtgcaaagcagatactgcttgctgctaggaatacagagctgactaagagctccttttctctttatgagctcacagtctcatgagttcaacgtcttaaggcacaacgtctaaagcaaagggcagtaagtaaacactccagaaagtactggatctggcctaggacaaatggtgggttgtttttccagctgttatttttcctgccccctaattgacagtcctccattacacctctgggatacctagtctgacttgggaaaacctgactttgggaatcagaggcagtctctcttgcttatatatgaggaactctaatggatacttactgtcattagagaaactctgcttctagcctggctccttttgtaaagaaggttgagtccccttggagagcctgcagaacataaccatttgcatgtaatgaacagtttgtaatactttgagattgatgtgcaatttctatttgacaagggaaaaacaattaggattaaccgtggtcgtatatcccagaataccaacgttgtttccacactctaagtgttgttgggtcattatatgagattcataattttgtcctgttgtacccacgtttgcattaccattcagtcttaatttattataccctattaaaagtttttttggtaatttgttcttattgctactcaggcattaaaatgtctgcaggctgtgaaaatgaataaatttaatgtggcagcatagttctcaaaatcctggctttacaactcatagtacaggcttgtattgtaaatcctagttaacatggatttatttgaaaatccaattttactgctaatcttaaataacacatttttcaaacattttatccttgaatttctatttttttataatttatggctgttgtatgtatttacaaaaggacaatgtgtgtacttttaaatactagtaatggattgctgaaacaactgtaactttaaaacaatgcaattgttaaaaaaataaactgtgcagcctggcttaatggaggcttatgaacatatgattaagatatatgctataataagcaaattcactcaactgatagttcataggaactttcaaatttaatctcataaccagtgctatccttcaaagaatggtcagggcaatttaacgagtacatgaccacgcaagataatttcattgaagagtggctgaactgttgaaatattttctagtctccttgggatatcattaagagcagaaattttgaaatggaattgtaatgatgttcagaaaagataagtaggtaactctcttaatacgttttgtgctgctgtaacaaagtacctaagactaggtaataatttgtaatgaacaaaaatgtattggctcacagttctggagactaggaagtctaacattaaggtgtcagcctctggcgagggcctacttgatatgtcatcacatgatggacgattagagggcaagaaagatcaaaagggggctgaactcccacttttataagggaaccaaacccactcgtgagggtggagccctcaatccttaatcacctcctaaagctcccaccccttaatactgtcacaatggcaattaaatttcaacatcagttttggagggaaaaacattgaaaccatagtagtgatactgactactaccacacagggcttgggaggctaccctagctgttgcacccaagagatgaatcttctaatgtgattacctttatcattttttttactttattaaaatacttttattttacatgtatacttttgtctacccaccatttccatgtctgaccactgctactactatgtcctagcataacattccatacatccttaaaaccaagcaaagggtggagttccatctttaaaaactaaacaggcattttggacaacacattcttggcaatggaatctggacaacatttatcaaacatggtagggaaggttctcactctgcattatcaaaacgacagccagatatcaactgttacagaaacgaaatcagatggaaaatttttaacaaattgtttaaactattttcttagagagacttcctccactgccagagatcttgaatagcctctggtcagtcatctggaagcaattcttcacataattcatgaacttggcttccactttaggaagagaaccacctttttctatacttgcttgcatttttgctttaatgtcttctacagaactaggtcctttgggtgttttaggagtttttccttgttttgaaggattcttgtccttttgatcttggtgttgacggttttgagtcttttccattccgatttgacttttgtgcatttttggctggagtatctcatatagatttcttcactggcgctttttcttcagtttcctcatcatcaaaatcatcatcatcatcaaaatcatcatcttcatcagcagcaagttttacttttttctgtggaaccttgctaccacctccaggagcagatcgctttccagatatacttatgagtttcacatcctcctcctgttcgtcttctgactctgtatcttcctccccagctactaaatgctgtccactcacatgcactggccctgaaccacacttcaaccgtaagaccactgatggtgttatttcaaagccctcaagggaaaccatgggctgtacagacattttcaaagctgccagtgttactttaattggactgcctttgtaactcattgcctctgcttcaacaatgtgcaatttatcctttgccccagcccctaaactgaccgttcttaaagataactgttgctcaatttcattattatccaccttaaagtgatcatctttgtcggcctttagttcacaaccaaaaagatagttttggggcctcagaggactcatgtccatcatcgtccatcaggtggcaggacgcacttaggtgggagagaaggcagatgatgataaaggaccactgctcaagagaacagctgtgcaggacagaatcacaccagggagattacctttatcttagaaaacctgaacatcttgtgtactttgacacttctctacatttcacctaacctttaacatcaacacatttattcagaaaacttttacttttggagctgctctgtgtcaggctctatgctaggtgctcaggatattgaaattgatacaatcctaacctattcacatataatccaaggtttgctgaaattgatggacatttaaacaattgaaacatttaagtggtataattagcaaatggacatttaagccataaaaatagcatctaatagatataatagaggtcggtacaccattgatgagtcagagcagaggcaacccaaagagtaactagccagaagaattgggaaagcttcatagagagagcgatatgaaaataagggagagaattgtaaatccatgaaaatgagaaaaagttgaaaagtgatggtgtcagaaaaacttgtggtatgataatgacaagatgagaggaactcttggtaagcgtgttggatgcatggaaagaaatggcacaaaataatgctgaggacattttttattttattgttggttttgttttggttaatttcattttttaaatctagtatgctagtgttcattgtccaaactgtgaatcataaactcagtttgtggatcaacaccggcctttgatttttagtgaaacaaaatagaaaatatcagcattcatcacaaatagatgtttcacagattttttgttttaattgcgactgtgtgtgtgtgggtgtgtgtgtgtgtgtgtgtgtgtgtgtgtgtatgtgagagagagagagagagagagagagagagatggcttggatgtttatcacctccgaatcttatattgaaatgtgatttccaatgttggaggcagggcctggtaggtgtgattggatcatgtgggtggatccttcatgaatgatccctttggtgacaagttagttcatgctatatgtggttgtttaaaagagtatgagacctcaacccccacctgtttcctgctctcccctttgccttccaccatggttggttgtaaacttcctgaggctctcaccagaagtagatgccagtgacatgcttcctgtacagcctgcagaaccgtaagtcaaaagaaaaccccttttctttttaaagcacccagtttcaggtatttctttatagcaatgcaagaagggactaacacagttgtatgtgtatgtgtgtgttgggtgatttctggttgagtgtcacaaggttgtaatatggtgagtgtaaggaagtataagttttagaaaattaagaagccagttcagaaaactaatacttttggaaaatagtacaaaatcaactttacaagaatatacacagaaagatgtaatacaagatttatttcattgcagtaatttataaagttggtttagtgccttgcttttgcatgctgttttaaaaattaccaagaatatgacttcatgtgattttgaaatactcccagcaagataggtagaaaaggtattcttataactcttagacaaaaatttcggaaagtttaaacgctttatcccaaatcataaagctaataaatgaagaatctgggattcaaacaccatattttttttactgttcatcagctagaagttagaaatgttaagccaaaaacattaagtcactgctctgcctaataaatcttgaggaaactaataaaaagaataataccactgactacaggacaaggtcttcctaagagaccttaaatatattaagtgatgaagatgaaacttcttttattcataaaaatgttatttagttatgagtagagctctaattaaacttattttatattgtcatcagtaaagttgagacataacatatttattaatataattataatttgacccatagtgtattaaaagaaggatgttaaaaggagttgttattagagatgatgttagggttgttgatgataataacagtagtcataacataacaaagcacttcataatttaagaagtgccttcaattacattgttactctcatggtaatctctgtttgatatatagatttggcggattctatatcactctaagacataggttactgaggtgacggaggaatttagcaagcggctgtcaaatggaggacatgagcattggattgtgtatggcaagggctgatggtctctaagaaagcctcttggtttccacagggcagaagccctttgaagatcatagccaaggatttagtaattgcctccctttcagaataccctcaagagaaaagcccaccataagacatggttccctacaggcaaaactgcttttccttaaaatttactgttccctgaatatcagccttctttggctcattcaacatagttttcttaagtttcaggacagtgctgcagaccaaaagtttcaacattgaggaaaacaatactacttgtgcagtgaccctacctcagtcagggaggcagatgcctgcctttatgtgagggaataaggaatcaatcatatttccagcactcaagaaagccagtctagtgcagggagagatagatacataaacctcaaagttatgatatagcataatagttttaaatttccataataactgtattttaaaagttttatagaaacagaagagatgacctcagtctggaaaagccagcttggagaatggcaaccaatattaagtggcaaaagctttgggatcccaggcctccagatggagggtgatagcatgggccagacaggtaggttaggaaaactttgcaaaggacattacacggtacacagacaagtctgtgttttagcctataaaccacagttgcagaatgtgtttgagcaaaggcttttggggatgagatttgcacttttcaagatttaagtttgtttaggatacttacggtttgctgtatacttcctgggtttttacattataattacggtttgaactttaaaggaaaactgcagtttagcatacttgaaagagtgcaacttcaagtcatgattggagacagatatttaacagattttgtgatcctgtgatgcttattttcttctcagacataccacatgacaatcatttttaaacagtttatttctactttagcatccatctgaaggtgttgtgtatgttttctgcttgaaaataaagcagtgggctgggtgcggtggctcacgcctgtaatcccagcactttgggaggccgaggcaggcagatcactaggtcaagaaatcgagaccatcctggccaacatggcgaaaccccatctctactaaaaatatgaaaattagccaggcgtggtggtgcatgcctagagtcccagctacttgggaggctgaggcaggagtatcgcttgaacccgagaggcggaggtcgcagtgagccaagatcgtgccactgcactccagcctggcgacagagtgagactctgtctcaaaagaaataaaaaagaaaataaagcagtgaatgcgattaagatggatttattatgatcataaagtactcaggagtcttattttaaaagacagcattactgtaattaaaaatatagggaagaaactaatgctgttttgcgtatcattctcagctctctcaaaatcagatattaagctcttgctgccaaaggagactatactgcacggtgctcacctgcataaactttgagagggttgaattgtgccaagcaattctctcaatacataaattaaccaaatatttgttgacctactgtgtgacaagtattattccaggaaataagagatccagcaatgaaacaagtatggcttcttatagagttcccaaaaaggaaataaaaggatatacgtatagtgatatccctgaattaaatttctcttttgaaaataaaaattctatcataagctgtaactgccaacacttcaatactcattcagcagttttcagggatttgtaccttttgacttatgagaatttggaagtctaattgtatcattgcactggagtcttaaagaaacagataagcgaatgactttgcctgtatcattgttgactgtacttacaatcagaaaggggcacaggacagatgccagggagtaagtggacagcccataaatggaatggtaagaaagaagaactatagtggatttggaaagttcccttcagcattttccctagacaatctttggctgtgtttgcatgatcagtatttcattcacaggatattgagctcttgatatagttctcaaaacccaaaatgaaataagaagtctactctttatttaaattcaaattccagagagttaagtaactttccaggaggtaatctaaatatggcctccttgttggggggggggggggtgtttgaatttgcatataaatagtctcacccttaaaggaaaaccacagatggtggtaatgatgtagtcataatgtacatctccacagtggtggaacaaaatatccacagttttgctttccccagtttcagtgacccatggtcaactgctgtctgaaaataggtgactacaatacaataagatattttaagagagagaaagaaagatcacattcacatgattttcattacaatgtattgttataattgttctatttttattcatgatttttaatctcttaactgcgccaaatttataaattaaaatttatcacaagtacatatagtttatatagggctcagtactatctgcagtttcagacatccactgggagtcttggaatgtatcccctacagataaggggtaaaccactgtatcctatttgtgtgaatgctacaggtgttgtgagctcataacaatatgacatcaacactgaactaatccaggatttggtagtgagagtgatgtatttgcaaggagtgagacgtggtgcctcatccaagcagagaaataattttgaaatttgcctgacaataaaaatcacaatgtgaggtctctctttagagctgcaaagtccaattcagtgccccctagccacataagatactgagctcttaaaatgcggctagtactaattgagatgggcactgagtataacacacatgccagggtttgaatacttagaaccaaaaaggaagtaaatgctcatttattgcatgttaaaattatggttttattatagttgattaaataaaatatataattaaattgacttcattttgcttttaaaaatgtggctatgaaaaatttcaaattatatatgtgtgtgattacatatgtgtgttttcacatatgtaactgatgttacatgtgaaattgattgttacatgtgacatgtaaaacacgttacctaacacgtgcatatgtatgcaacacatatgtaacgtgttacatatataacacgttacatatgtattgttacatgtgtgcttgcattacacacatgcataatatgaaattacatgtaatttcaaattacatgtgtatattttgaaaattacaaattacgtattttgttatttttgctttacaaagtcaaatttaccctatttaataaagcatcatgagttttttataactagtaaactttgagacttttgtaggagaataaataatgcttattataaaaactgattggaaaagtgagctggagcagggagcggaggaaaaaggactagagatcacctttcttcccagctccgctcctctcccaaccttttttctttccattctctcatcccaattcaaaagtgcagagttcacagttggtgtgctgatttagaaaacagatatataaacagccttaaattttctccaggcttttacaatgaaaagaagttcaatatcaaaagtaacaatataatctgtggaaaggtatagggggctatgtttttgaggtagaaactataggtgctcctggccaagcatggtggttcaagcctgtaatcccagcactttgggaagctggggcgagagtattgcttgagcccagaagtttgagtctagcctggcctacagggtgaaactccacctctactaaaaatacacacacacacacacacacacacacacacacacacacacacacacaaaagccttgcgtggtggcgcttgctgatagtcccagctactcaggaggctgaggcgggaagattgcttgaacctgggagacagaggttgcagtgagctgagatagcaccactgcactccgacctgggtgacagagtaagactgtctcaaaaaaaaaagaaaagaaagaaagtataggcactccttatatgcagctgctcacacccctcctccttcacacccctcccccttcacacccctcccccttccccaaaatttgcaaggggaaaaatgtgtgtaattggcagtatttagtggcgtgcaaccgtgagtcatcagactgcacatcctcacttctgctagtggctcagtacccaacagcactcagtgaaaactaactcatttcaaaggtgaaaacaagtgagtttggccaccagggagtgttcaaaactgtcagtgctgaagcaaatgtggagggtgttctgtagtttgttcaggttgatatttgtggtccaacccctagctgaactactaattattaatatctgtcttgatggtgcctcaggagaaagcttctcaaagggaatcaatgttcaaattatagtaggtatcttggccatggaagttattgaattttagccaatacttgctactctttcatttatagtgtgagaatgcagtgtaatgaacctgactctcactgtcctgacttgcctttctcatcgcattcacaataagcacgtcaatacgtatacacatttcatatttctaaagtttactttatttccttattgtacatcgctgtgctgctgatggaagagaaaaggaaaaacactattgattgcaaaactgttttatctttggtggcttagattttttttgtatgatatgtaacgtcttgcatacctaaggcaacacgaagctaaatagatttgcatatagcatgtattttttccaattaaatgtttaattttgttcagagtatactggggacattttgaataatggagaaaagtacaaagaaaattcataattctaccacctatcagcacagtgaaattttatgaagaaacataattttcatgtaaatcatagtgaactcacggtaggttttatttaatacagtaattggagagctggtaggaagacaaaactggttcaaaagagaatacaagaaacaaatgcttctataatgagtgaatttttaaaaaagtattctggaataagattagtgaataagatactaaactcgttgataccctacagcctttggggttatatcctctactgggtaaaaagtcatttacatcatatcagttttctaaaatttgcattgaacttcatagcgttgtaacatgtgtgggcccaaattaatagtaaacagtaagagttgctttactctgaaaatattgaagctcttgtgagggtgtgaggagtttgttagaaaacaacgctaccattattttgaaacacacacgatcatcttttgttttacttctaagttttggataatttttcttaaattatcttattatcttatccattttcttaatttccttaaccttttaaatgtttctcctaggcacttttattgatttttggaatatagttgatatgtgctgaatttttatcatccagttttaattctactgaaaaatctaaaagatgttcatcaactactatatttcaaatgcatacatcccctttcatgctaaagaaactgtatgggaaacacagtctgacattttcaggacctggtatcattaaaagtcttgacactgttaaaattaaacaacgccttttttaaaatcaaaggatacaaaagggctgtgttggtcagaggatacaaaatttcagttagataggagacataagttcatgagatcttttgtacgacatagtgactataattaataataatatgttttcgaaaattactaagagagtcgattttaagtgttctcaccgcaaaaaaatagtatgtgaggtaatgcatatgttaattagctcattttagctagtccacatttttcaatacaatgtgttgtataatacgtgatatatacaacttatattttccaattccaataagtaaaaataaatgtaaattatttgaaataaataaaatgtgaagaacatccacttttcatatgaaaccatgagatattttctgttaaaagattaaatgtccaataaatttttgatgttaacagaaacaaaaatgtttaatatttaaatacatatttgcatgctattgaccccctgaagttcactgctgggctaagtgaaccaactatatcttaagtcaaaaatgctgaaattcttccccaaatcccaaagctcatgaaaacataaacagaaaatttccaaataattctacagggaaaataagacacactatttgatctgatcaaacaacgggatgattatggttaataatgagttacttgtacatttaaaaataactaaaggagtgtgattggattgtttgtaacacaaaggagaaatgcttgaagggatggataccccgttctccatgatgtgattattacccattgcctgcctgtgtcaaaacatctcatgtaccctacaaatatatactcctacgatgtacccacaaaaattaaaataaaaaagagagggacccgaagataagctaatatttaagctcatcatacttattaagataagcaatacataccgaaagtaatagcatttaaaaccagatgttgggggagggttctaacttgttcattaaaattcaaagtcacctgtcttgttttttcttttgtttttgtttttttttttttttttttgagatggagtctcgctctgtcaccccaggctggagtacagtggcgcgatcttggctcactgcaagctctgcctcccgggtttacgccattctcctgcctcagcctcccgagtagctggtactacaggcgctggctaccacgccccgctaatttttttgtatttttagtagagacggggtttcaccgtgttagccaggatggtctcgatctcctgacctcgtgatctgcccaccttggcctcccaaagtgctgggattacaggcgtgagccaccgtgccaggccacctgtcttgttttatcatgatcccgagagtatatatgtatgtgtacagctcatctaaaccctttttctttcaacatgatcaatagattgaacattggagatattttataagaaataatgaagacaactcaatcagcacatatatatattaaatgtggaatctataatgattgcgaagcctgaagcaaactaaatattcagtaataggttctttttttccatggtatatccatttgaatatataacataaatgccttacatttgttttaactatttaaggtttatgttgttagtgtgatgaaatggctggcaaaagtcagaaactcaggaaagtttcaggcttatatctggagcctggttttctttcttcaaggtagaacctctgtgaagtgaaaaattttttttatatctggagcaataatgtagaagcttaaatgtattatccaagttgtcataagcctattatttctttacattactgaagtgaaagacagcattaatggctaaatgccatacttggctataatttatattgtttaggactggaaatgagcctgaaatgtacatttttttccaaaatagttcatgtaatatttgaaacctgacaagtaacctgatgatttcatggaataccatcaaatataaatgtgaagttttaaagacacagggaaatactcagaataaaccccctaaccacaggccagcagaagaactagacttgagaaaatgaatgggaagatagatagtaacaaatgacttctttggcagccttatatatgcttagtcttatagactgttttatggatgctctgcactctatttccagcaagtatggcatttggaacaggaccacacgagacaaactatgagttcacatttcccacaactgcacagatagaaagagggaacaacagaatactccctttcttcttgaaacaataacttctgttgaagctcactggcttcttttcagctgtttctgctagctcctcctccgcctcttgacctctaaggcaatgctcttcaaaatttcaagactgctttctaattgaaacaaaacttataagcacatttcttcccacaaaatgtacatttatttgtaaatcatatatgaatatgactaagcatgtaaacgtatgtgaaaatagaaatcaataaatataaatgcaaacacaaatagaagcattcacagttttcttttgtgtcccagtgagttgttccaaattcctcggaggtaggtatgtcacagtttgagactataccttcaatcctagggtttctggtttcgctctcctcctaggtgatagcatccatttctacggacttaactgccatctttagttgaataactcctctatctttccatcccatatttctcttgattccaaacctgcttgttcacctgagcatatgacacaattcattggctgccgcacatgcagctttgacattttatttaaaatctttccccttccccagccctcatctatttcacagtagtatcttcttcttatctacttgattggtaagcagagtccacatgattccatcatttatctcccattttatatctaatctataagcaagtaatgcaatgcaacttctgtctccaaaaatttattttgaatttgccttctcttcctctgcatctcccccatcttaggccaggtcacctctgccctcttgccagattaggtcacattctcttactactgttgttattctcttcctattcaatcctacaccgcagcaaaatggatcttctcaaaatgtcagctagataaaggcatttctgtgcttaaggccctcatggatttatcttattaggatgaacacccaactctttattatggcttagaatacaatgaattacaacacataatgaatatattatatttctatctttaccattttcttcttaagtcaacctttctcaatccatataggataatcatattagtgcttcctcactttctaaaacatctcagggcctttgcacgtgtttctctgttcttagacccagaatgctcttccttttctctttgtgtagctaggtgcttctttccatttacgtatcacatgaaatgcagtcattccctcctccttccctcactacctcacaaaaagttgatgcctctgttaaaccatgaatggaattttactcggcagtgaatagaggaaaaaccaatggtaaaagcaaccatatgaatgaatgaatgtcaaaaatattatgctgagccaaaagtcatagacacaaatatgggtatttacatgaagttaaagcacagcaaaactcaattacggtaatagaattaagaaagtggttacctctgggtgagggttggaattgagtggacagaggcattagtgactttttcggggtaatggaaatgttgtctattttgttcaggtggtgaatacatagatacattcaattgtcaaaacacatccatccaaacacttagacttttgcactttattatatgcaaattatgcctcaactgaaaaaagtttgttttcaaaattatatcaacagttgaaattcttttaaagatttgattcaaatgagattaattctgtatccatcattgatgtatgatagttttgtatgtagttaaggttattggagataattgaaagttatactcacaagaaggctgcataatatgaagtttatctgccttgatctttaatagctttcgcgatttcaacttcttcacagctctgtaagaaggcagtgtggcatgttgaagcaagcatgtgttttagagtaacacagagctggtatacaaccccatgtctaccaattatcaatgatgtgggtatgttgctggatctcaataatcttccactgtgaaatggaatgtaacacctgactcacaacgcaaaggtatttaccttatgtaatataattcctgcgatcctgggacctcccttaatcccatccacagatgccaggttaaagaccccatcacagactagaacaagttgggatgtcaaaatgaataaatattaatcgaagggcctattgtgattgaacaccacgcagtaggcactctctaatacctaccgtctccctcctttttgggggaaacattctaaatgtgcaaaaaataaagggttatttgctttctggcacttgggatcgatttattgaggatatgttagcagaacagcaaaggtgaaacactaaaagcaccatcaatacacaggcagaggtgaagccataaagcctttattttttaaattaatgcacaatatataagaggtatgttagaatgaacgtccaatccctgaaaggatatacgaaagacattcataaaattacatgggcatgttttcttaatgttcaaaatattgttttaattagtgtattatgagtttattcatgtgtctgtgtgttgtgttatattaatcttttcttgcattgctataaagaaatacctgagactgggtaatggatgagaaaagacacttacttggctcacagttctgcaggctgtaccggaagcatagcagcatctccttctgtggaggcttcgggaagcttccagtcgtggcagaaggcagaacgggagcaggcacttcacctggctagagcaggagcaagagagacagaatgaagtaccacacacgtgtaaacagccagatctcagagaactcactcatcatcatgaggatggcaccaagaggatggtgttaaaccattcatgagaaatccacacacatgatccagtcacctcccaccaggccccacctccaacactgggaattacatttcaagatgagatttgggcggggacacatatccaaatgatatccatgtttaatcagaaaaataaaagttaacagtaacagtgattttactttgtagacctttgctaatggctgaaatctagctccattccgagaacagcctgcggtacacattttgaaagatagttgattaatatgaaagaagccttatctgtagtccttaaggccattatggtttacatatatgagtaaatattccaaagtagccatgccagttaacatatatccagagtctaaaggccactgggcgacaaaagtaaaagatacatagcaattgttactttatatcacagtaattcttgtatattttaaatggatatttgcatttgaggatatccacttaagagttaggtacatggctcttacatttaagtaacatttacttaaatttctggctgcagcaattccacataggtagaaatgaagtctgaattgagttgggggtctttgcagtgctctctctgttcattggctattttgacaatgctgagagatgtggttagccattctttttcatttcatattggcaacctagagagcaattaagccttctccccttaactagatgtatgttttactcatttctggatctttatggctgactttgaatcctagcctgtggtagaaagcatggtgtcagaaggaactatgagttaagactatgcatacttggctttgagtcttgggtatcatacctccctcatagagtgaaggaaccagggattcttcttgaggcccagacccggcatccatgttaagaatacctgtgcaattttgcttcctgatatttaaggtgaaaatgcatgtttgggtcattgtgaggattatgtgagatgttacttttaaatataggcccccttattatatgctctcatagtttcaggcaacacttgtcgtatttgtaacctcagttttaactgtaatgtttccatcaatgtccctcttacctggtacaggggctcttcatattcttggattacaaatctgtgaatgcaaccatgcatcaaaaatattcagaaaaacaatgaatgcctacctctgtactgatgatttataggtgtttttcttgtcattattccctaaacagtacaatgtaataagtatttatatagcatttacattgtattaagtattataagtaatctagagatgttttaaagtatataggaggatgtgtgtaggttgtatggaaatagtatgtcattttatatgtcacttgaacatttgtggatttgctatccgtggggatcctggaaccaatcccccatggatactgagggacaattgtattataagcagcaagagggaaaggaatctgtctattttgcccaaaatcgtgttcccgggacctagcatagctcctggcaaagagtatacaacaaatatgcattgaggagagaacagagggaaccattatccccttattctcgctgttccttcatgtaatgaataaacagtcaaatcttacaagagattttaaaccagtcagagaaaagttggaagttagttagttgttcatacattgagaagcctcgacgctgtgtcatctaggtaatgaaagatctagggaagtttagcagggagaagaagagagatgatagttgtcttcaaatgtttgaaggactgttacggacacaaaaatttaaacttgtgctgaataattccaagaggtacacagtctctcgatagaagctaaagtggggggtgacatttgactcaacaaaaagccatctaaatatcagaactttcaaaagcaggaactggtgcctcaattaatagtgtgttttctagcacttatgatacctgatcataggcaagataatgaaaaattgggacctgggagttatacatgggaatttgtttatcagttgggtgattaggagaggtggccttaaagtcctgttgtgttctaagagtctgtgattctgagtcttatttcccaacaagagaggtacagagcagaagatgggattgggagaaataggataaagataccaggaaatcctaaaggtaagaaaaggaaggcagacctgaagctaactctatacttcaggtgcttgcctagagccagccctacctacttagagaatgttgaagagccagttaaaacatctttaacacggatgtaaaacaaaactatcaaaacctgaagatttcgaatgttctaacctactcgtcagttgggcttttttcacaaatacttcagtaaataggcataaatttattttttaatgatagaaaatatctcttaaagaacttataactgtggataaaagcaccaccataaaaatcttgtggtgaaatatatatatatatatatatatatatatatatataaaattttaaatatggttagctagaatatgacgacaatgtttatgaaacacagagactcttgacaagtcccatgtatacactataaaactttaagttatccactattcactcactaagcttatacttaatgagtgtctgctgtgtcacttattgcggaaggcacaggcggtatagcattgcacaaaacatatgtggtctctgatggagtttttcagtctagtggtgaaagcagtgaatgggtgtacagatgttaaataattgtacaattagttgcatgtgtaaacgtcaaagttcagaagatgacaattgatctacggcaatgtttctcaatctctgacgttttgagccaaatacatctttgttgtggtggactgccctgtccactataggatgtttggcatcacaactgacctctgcccattagatgccaatagtactctcttctttaatcacaaatttgtcccagacatttccaaatgtcccttggggagcaaaatcatccctagttgaaaatcactggtctagggggaggtctttatgaggaagtaacatctaagaaagctggtatgtttacatatagctacagtctattacacatgtatacatatgtaacaagcctgcatgttgtgcacatgtaccctagaacttaaagtataataaaaaaaatgtaacaaaacaatacagtatgataagtgctatgggaccaaagatgaaagggttctactgcacagttatgaactcatagttaggcttttggggtcaaaattttgctgaagatatttgccacccacgtgacctttggcaggtgacttagcttattcatgcctcagttttatccaatgtgaaatggggctggaaagtcccatgtacttcctaataactttgcggaaataatatgtggttatataggaaaaaaaaaaaaatcctagaagtatgcctgctgcgtagtaaaaggaaggagaaggataaagagaaatctgcattttttcttctgtaatggggcagatagtaaatattttaagttttgtggcccaaatagtctctgtcacatttacttgattctgcagttgtggcattggaagcagctatggacaatacttaaattagtaggtgtgcctgtgctttcaataaaattttataaatacaaagtttgcaaaacaaagttgttttttttttttttgtagtttgctgacaccctagtaaagaagcaccattgtcaacgttaaaaattatcaaatttttatttttcaaagttttcaaatttgctttgcttggtctagctcatgaaataagtcaaaagtagcaagacctccacctctaaaataataatagtaatgataacctcaaaaggaaagaagaaatatttttaaagaagaaaaattattgttaaataggattattgtgcagagaaaacctaggagactcaattttaaaatctgtgaaataattttaaaaatactttatgaatagatacataatagcttttattcatattaatgactataaatgcaaatggaaatatttcattcacactgatgacaatgtataaattaaggaggaataaaaattgtagaccctataggtgaaaagcataaaaatatacataagaaaaagcaaaaattgactacgtaggattgttttaggatttaagatttattgtcattaaacttgcaataccagccaagttaacatttgaatttaatacagttataatcagaatgcttttgatgtgtttgggggcaatataatttcaaaggaaataggcaatgatgtaatttaaagtttatatagaaggaaattgtgtgcgtgtatgtgtgtgtataaattggaaacaattttattaataagcatattatggcagcaacatacacttccagatttctactatactttgaagtaattgtgatcaaaaccacagtgtgctggcataaggctagagaaatgggttagtggtttacaagtgagagtccaggaaaacatccaaataagattggatattttagttctgtgtggatagcctatttcacttaataaatagtgtctcgtaattgactattcatgtacctataagtttaactatagaccaaaaaaacgccctactagattaaggagctaactagaaatataaattcatataaacaataaaggaaagtgtaggactttataagcttcatgggagacagatttttggtaagtcaggaagcctggaagacttaaaacataaaattggcagactgaattaactgatagtttaaagcttccatagagcaaaataaatcataaaccaagttttaaaatatataatggatttagagaaggtatttacaaaaatatatgactaatggaggttaataataacaatatgtaagaaggatatgaaatggcattttactataaaggtcaaacaaatgacctataagcataataaatcatattaatctccactagtaataactacacacatctacataatatagatgttacgcctgcatttgatttactttatctgtcttttggcagaactatttgtcaccagataaaaaattctatatcattaccagaaaggtatattattataatgtttattatgttgcagttgtaaaagaaataacagcttttcaattgtttacaaatcctatagaacatttactgaaatacatttacattttgtggcaaacttggatttaaataccgtgttcgtgctttgttttatgccgttttcccatcttttctccaggaatttgattgtgcttcattgaaagctaaaaagaaaaaaaaaataattctggttttggtttaaaaaattaggttaggggttaaaaagttgtacgttgtcttctgtaaaaataaaaaacaagttttctttgtttcttggaggctttatattaaatggatttttaattcatagacagcatattgtgatgaaatttccccatgagcttcacattttgtttcaatagcagaaactaacttggttgcagttactgcccttctgagaacagtgttctggaataattttgacatacatatgtatctctttttaaaacatgtgttaatcttttcataaagaaagttttcccagctgtgtcacctgtgactccaactttctggggggacagggatatgagatgttggaagggaatggcttgaagaaataaagtgcaaaagacgtaatgctttcctgtggtagaaatgtattcagtgaccctgaatgaccttcctactcttgtcccttcatttttcccacaagtatggtctgggcaattataaaaattgacatttgcagtgggctcttctgtaaaagatgctcaatcagaaatgatttattttagaaaaagagatgatataaacatatatatcccctgtctcggaagtgtgaaggttgaaaagcaaggagatgatcttcaaagtgtctaaaatattgatttgtaacatcgttttatgaaagtgcttcagattattttttttcttggatggccccttatgctttggtcagttgatgctaaaatctgaacttctttattttaaaaaaaacttttaattttgaaaaaggaagttcacggtgctgtctaattctttttagatagtcattaatgtaaatgtaagagtcattctgagaaccacatctgctgatatgttccgttaaattacaagttctatgtgtatttgctttgctttcatacaatgaatcttctttactctcttccccacctgccagaaattgccccactcaacgttcataaaaggtccattttcaatcgctatatttatttcagaagcagagatatcatatattcaaattttagttactttccaatatcaagctaataactcacacaaataaatcaaactacagcaaaacagcaatctagcattcaacaaaacctccccaatgcacatatttcaagctgtagatatgtatcatccaccatgctgaaataatgtacatgttcaaatcaaatggaaaactagaatcaaaattgttgattacttcttatcagggcattttattatatttaagaaaaatacaaattaaatcattttcaggaagcaatccttctggctaagatttttttagcataatgcttaaagttaattgttgatctttatctataaattcaaaggtggactaaaaatgcagaatcaatcaggtagtccattttgcatcaggtgaaatatataaagcataaaacagcgagttacatttcctaacaaaattgaattacagtgagtaaaagtgacaggacaaatgcattaagaaaagatggactgaaatggatagagtagaatatatgcatctataaaacacagtcatatataatacactcattttttttcttacgagtgtgagattaatggaagaaaacaacaataataacaaaaccagtgtgatgtgtcagatttcaccttttaattaaaaaattattcacttcagaggggaattttctttcttgggttagctcaatcatgtcagatcttgttcatttaaaaggtcagtttacttgccttctgaggtttttgtttgggaaaaagaaaagaaaatagattttcattggtatcctgggtagaattaattgtttatcattcatttttaagatctccgagaggcagaaaaaggggaactgtgcaacccttttgtccttctggatctcaaaatgaagggatacattctgctacatgaaatgtggaattaagaccatgatgcaacatgataaacaacacaaatttgggggtgtctctgtgctatacattattgaatttttccatgctatacactttttggatgtgtctgtgctatttattcagtttttttaaataaaagtttttgtagactaaattgccctctctactttgcatcgtttttgaacaaaggattttcaagactgataagctcaaatgtatcatttattgtattcaagtagcattcaatttttctttagaagtataatttgtagatattttaacacagaaaacttgcaacactgctcatgataggcacttattatatattttttgaaagactatatggataatgattctaactttgacttttcctgttttgccttcactttagaattaagcagagaatcaaatccatattcctgggggcgatgcttggacaacagtatctctttaaagatctttgtgtgagtcgaaggtgcagccagactgggagttattgtgaagaaacagattcaggaaggttgagaaacttgcctaaggctaatcagatagttactggcaatgttgtttctaaatcactgtttggctccctcattcaatgaatctacactatgtgggactgcctcttgctcctgacatcttttgctgctgaaataaatgaactcaaagcctagaaggtagaaaagagggagttcagaattatattcaggcacaaataccaataaggctattgcccccagaactgcaacttctcttggtttaacagataactatttagctgtgaggtacaactgaggaagtggacacacaagttatcaggagattctgatgtgccagtttatatttcttgtcacaggtaatgattcgaaatttcttaaaacagctgtcctcacagtggagtaacctgggagtacatgaaggcattccaaggagtaggcacagatagttttaagggaatttatttctagatcttctactttattttgtactcttcctgaaaactgaattgcctgaaaaaaaaaaaaaaaaaaaaaagacatctgtagtcaagacctcaggctgtttctcctttctaaccacttgccttttctaaccacttctcccaatttaagaaaaaaagccttatatttcatccaactctgatcttactaaggcttcaaacaaaagaagcatgaatgactttcatgacagggcaacatagctttttgcaagaagagtggttgctaactctttgctttcaactgaacccgaagagaagacctgataagttgtcagccgatagatcattaaaaatacgttttggtaagcaatcatcatgtacttttagcatatgccatagcaggagcacaaatgattaagcaatgctactataatacaattccttccgtttctttctactcacctatttgaataagatttttcatcatttacatctatacagacaaaaattagggatagaattgatgctgaagcctttccaattgtagaattaatttatattcttctgaaggtgtataaattgttaaatacccatccatcttattaagagatgtattttcaataaaattttatttttatgtttatcaaattttataatatacatatattgttttggtcaattgcacgttaataattgtaacaatacctcaattgaaaaggtttgttttttacatttaggacttacagtaacagaaaaaaaacactcattgtgtatacatactgtttaagaaaagtatactaggtgatcaataagattttttcaggcataaacatatatcttagttttaagatatcgatatttacaatgtccctcaaattatattattttcagtcatttaagaatgaaaagtacatttcgaatgcggattttaaatctgcaagggttgactcatttttcaagagtctttttaggggatacagaagcaagaatgtttggagttccctgatcagtatctttaagagaaggtatttgttggtagttcctagcaaattccaacagcctgatgctacttaaaagataatagtaattattttaaataatgcttctgataaaaaacattcatgcacactcagtttaaaaagatatttaaacatttgtagttgtagtttgggaactcatgatacaagtacagtctgtaaatgaagctcttagtttgcaaatatcagagataagctattaaaatgcagaaattgaaattgccctgatatatgcataaattagtgtcatctccatcttgtcagttagagtattttttagattctctctatgtatacatacatatatatatatatatatttatatatatatatatatttgtgtagctgtgcatgtgtgtatttggactaatgggtcaaaggacagtactaacccaattcaataattaaagaaaacataattttgagaattagctttatggtaattgtttgacttaaatgagtagatcagagaagaataagggctttcccttatttaaacaagcttcatttttttatccaaacatttacttagctgattaagcttcacttgtttattttcttcaaagcattcattcaggtgggtactgagtaaactgaaatatcacaccagggaacttcaacaccatccaagtcttaaaggcttcacttgttcacagttggcatttagtgaatgtctaggctactgataatattgtgagtaagttggcagggatcataagaaatgataaaatacagttcttgaaaatgttatggtttgaggaaaagatctatgtttggaattagactgacttggattcaaactctggctgtacctttgggacaaggtgttcagaaactctagcctatgttttttttctgcaaaatgatcctcttttccaggattcctgtagagattcaaagatatgtgaatgtttagaaaaagaatagacttttgatcattgttaattcccttactttccccaattagacttgtaagactgggaagaaagctacacaaaagattgaacaaattatagctgacagaccatagcaaaagatacagggcaaaacttaaaggggaaaactacacattaaattattttaaaccattaaatagcactaacttttgtcagatattacaaccaaacaccactcaaattaaagtaaactgaataaaatgcctgtttttttctgtttactgatgttttcatttgcttcattcatttattggaagatataaaatgtgttagacactgttaggtgctgagtgtataaaaaaatcttattaatacaatttaaacacgcacacacatatatatggttataacaattgatgccatgtatgtactgtttatatgcctatacattattccacagacctggggggagggggatgtagagtcttaccagaaccataggaatcttctcacatcaacatttccttttgaagtttgttcatgaggcaccatccagataatactaccatctgcaatgtggcttgagaagatgttagatttttttattacacataataaggctgtaaagtatttctgtatttaggtagaggtatgtaatacaatatgtatataaaattacatatccaataaaatctggtgttaaataaggactagcttctatgataatatagtctaaaggcttttcatttggtgttatagaaattatgtgaaatatgtttcctggagtagaattattcgcatttcagctctctgacagtggaagaaaagctagagggagaggtgaacaagagagggagcataatggacaaagctttgctggaagccaaaccaccacttcatatgtcaaatctgacaggcctcccattttaggtgtgctgtcattgaagctttcagctgcaccttgcctgtggctaggctattttcaaagattaaaatgcgaaactggaaattaaatgcaacttaattcccaatttaaatttccattatttttgaaaagtaaaagattaaaagaaatgtataattgcaattctggtggaagaggtaattataggaaaggtgggatgtatttcaagtgggggatatagcttactgcagcagagaggaatctaagctatcattcttttgaaattggtctggaaatatgttttcacatggaaaatatactatatttttaggaatttccttgtcatattactgtatccttttctgttagaatataaattctgaattccctattccactgtagatctgcctccgattatattagctcttctgaagttatcaaaaaataatgagatatacaatattccatatatgtcaaagcaattatttttaggttaagtaataaaccaatgacctttaacccggtaatattctgggttgttcataaaaaaactatattcaggtaataatgtctttccacttaagcaactgaaaaaatacacaatacttaacatttggttaattaaatacctactccagacaaaaggattttctgttttcaagttatcttagcaagctgagcaggaagcaatgatatatccaatcagaatatccatggaagctctgctacagtttcaaaaagttctcatcaggcagcttttaaaatgcctactctgaaaatggtccaggttaaagaacaacagcttcctcgtcagatagcagtattgcttggccatgtttcttcctagcacaaaaaagtacctgctcttctctgagtacctacattctaaggactatggcttacataaaacagcatgggttggggcaatttccagcacactgctcactctcgaaaacgtatgatgcaggtgagagtaatgtttttgtttgaatctgctttcactcgtggaagatgaaactacttgcaaagatctgtactttagctattatgagtaacaaaagactcctaaaatattgcacacattgtggggatggagaaccatcatcctgggatttgatggatcctatggtttggctttgtgtccccacccaaatctcattttgaattgtaatccccacaatccccacatgtcaagggagagagaccaggtggaggtaactgaatcatgggagcaatttctcccatgctgttctcctgatagtgagtgagttctcacaagatctgattgttttataaggggctcttcctgcttcactgggcacttcttcctgccacctgtgaagaaggtggcttgctccttctcaccttatgccacgatggtaagtttcctgaggcctccccagccatgctgaactgtgtgtcaattaaacctctttcttttataaattacccagtctcaggcagttctttatagcagtatgaaaatggactaatagagacgtgtctctcagaagtcacagtgatgcttgaacggatccagagctccttcttcaggaaggtcccaactcattctgaagggtctctccaagcccacctctctctgtaaatgggaaaggttttactttgagcactaaaacctgccagaattctcaattttcctaacagtgtgttaataaacacctactcatttagtatccaaaccaggtctgtatttctcaattagagctcaccaggctttcatcataaagtagagcttcaaattgtctgcaatcccactcctatcaaaaacctagaaggaggtaatatttcagagtaatactataaccagatgaccacatctaagaaactgctgaccctacgatgtaaccttctgtccatttttccctttggaaagtctaggatcttttcttataccagcaagttacaagcctggactacactaacttgctttccgcagaagaaaacaccatgagttctgttttcatattaagcacttagtctccatcagacatcaatcgagaaaaaatcattaaaaatcacattttatatttgatgtatatttctcaataatcctatgtattagttcattttcctactgctatgaagaaatacccaagactgggtaatttataagtaaaaagaggcttaatggactcacagtctcacatgactagggaggcctcacaatcatggtggaaggtgaaggggtagcaaaggcatggcttacatggtggcaggcaagagcgtgtgcaggaaaattgccctttataaaaccatcagatctcctgagacttattcactgccataaggacagcacaagtatttagctccctcagcacagaaccatccccgtgattcaattacctcccaccaggtcactcccatgacacatggggattatgggagctacaattcaagatgagatttggatggggacacagccaaaccatatcatcctatttggatgatcaatattatcaaggtatgctcccctgagggggcgtcctttttaccatttaactccaggacaaaagtttatttctttgtaaggacagtgtttatttcttatggtcctattttctcctaagatccagacaccaaaatggccatctatcattgacttaactcctgaattttgcttagagtaacagatttagtgaatctaaatattttctggctgtggaatgttaatttatacatgttcaagttacctttgattcatgtgacagtttgtgccaaaacacactcattatcagaactcagatcattatgttggctcttgttttcgttactaaaggaagaaaaacagtttctcaaaaagaaaattctgatacctaggaagaccattatacctcactcttttctttatctcatcaccacatccaatattataaaagaacttacaaagtaaaaagaaaggtgttctgtagatgtagcgcctggcttgtatggtagcttaaatgaacacagctaaaaatattttatggctagtgtccaaaacagtctggcaccagacaaaataagaatatttaaaattatattttagagttactttaagaggaagggagagagagatgtaggcaggaggaggaggagcaggaggagagggagagagagagagagagagagagagagagagagagagagagaatctggggtttctatggaagggctaagaatatgtagaaaacagtttacaaagaaatatggtccaagaatcgtgtgtacacacacacacacacacacacacacacacacaccccctggaatatttttcagccttaaaaagaagaagatctgtcatttgtcccaacatggatggacctggaggaccttatgctaaatgaaataagccagaccaagaaagaaaaatattgtatgatctcacttatatatggaatctttttttaaaaaaggtcaaatatatacagatagtgaattaaacagtggttaccagggtcagggtagttgtgaggaaatggggcaatgtaggtcataggatacaaatgattaaaatatattaatatattaaaagatataatatacatcatgaggactacagttaataatagtgtgtattcaagatttttgataaatgaatagattatagctgttcttgccacagagtgaaaaatgggtaactgtgaaatgatagatatgataatgttctccacaatggtaactattttacactatatatataaatatctatgcatcttacaccattatgtggtatcccttaaatatatacaataaaatttattttacaaacacatattaggaatgcatattctgatttttaacaatagttaacctcattaatatatttcacactatcatttctagtgtacatgaaaagtagtttattgacattagttgtaaaaaaaaaaaaaatggtcttgagacttttgggtcagagaatgttctggccataaggtaggtttctgcttgcctactagatatcttaacttcgatttcctgaacatcccatcacttcagaatctctcaatcctttctaacatccgcaacattgtttttctttctgcatttcttatattgactgatggatttataattcactttctctgaaaaaccctgcagttatcatatatccctatccattctggctctttattgcccaaatctctaccaaaatcctgtcagcacagcctctgaaatatttctcaaagcatttataatctggctctcatcaacattttcaacactctgttttatcattccactattttacatcatttcattttcatttttaccacaatcactcatccaacaaataagtatttagctccctcagtaattagtattattattattaattataactagatgctgagcatacagaagtgaacatgacagacataatcccagcagggatgtcagactttatgcaagtaatcaaccatgatgaatctcatgagattctgagagagagagagagagattgagagagagagagaaaggggaaccactggtgtccgagttagaaatttgaattagtatctgggtcaccaaaagcttctgtgaagaagtgatatagacttggccacacaaaactaccgtgaaggtggtggaaatttttctatgcagagtaccacatttaaagagctaagcctgagagtgtcagagataaaggaacagaaagaatgtgacagcagattatgtttggaagaaagatgttcaagagaccaagctaaagaggagatggggctagaacctggagggtccttcgggtcctgttgggagttttttctctgcccagaagggctttgtcacgtggttgtcaggaaagagtcatgattagagctttgattcagagacttctttcgctgaagtgtggagaatggttcagagagaagcaaatctgaatggacaaaagaggttattattgtaatcttggcaagaagcgatggtggtcttgactaaaatagttctagtgagaatgtgacaacaaacctgagaaaaatacaggagacgtaattgacgggggttagtgttaagttgaacgattgcagagttgaatttgaggaaagtgtcatatatcattcccagtttctgatgtcatacacctctggagataacactgccatttcttttgaaatgggaaaataataagtgatcagtaagtacgtattggataaaataatgaatggttaaatgcataaggggagaggaaaagagttgcagagaaagagagtaaacgtattttggatgtgttaattttgagatacctttgaaaaatccaagtgaggggttgggtagtcagagaaatgaatgtggatgtcaggacgaaaggtgaccgtgatgaactgtatgtcttcctctaagcacgttatacagcttcatgtcacaagtgactcacttcatgtcacaagtgactcacaaggtcacttgtgacaagcatttgcctggtgcttcatccctaacctccctttctatactcagctaaaatgtcacctacaatacttcttccttgactccaccgtccccactttactgatatgaatacattttaataaaatgatataataatgcttagtttgtaaacctaatgttcctcaagtggtataattatctgatttgtatgtgatcatcaacccaaccatattaggagcaccttgaaggtagaagatttaggttcatgcttaacaccacatctggaccactgtggatttaactttctacaatgattgtattcattaatatattgggtgcccactatattccaagtaatatcctgcacactacgtacaaggaagcataggtcccgtgtgctcatgaaactgtaattttagtaagcagggataggatacaaactgagaaaggaaaacaatttagaaagtgggaaatattatgcacagaattaataaaaaagagaaaaatcttgaaaaagtcttcaatacctcacttggaaggtgattttgaagaagaactgatggacaaactagagtcagccatgtaatgatgtaggggcaaagcattccgggcacaagggacagcttatgcaaagaccttaaaaatgaactagctttgtatgttggagaaggataaagagaactaaggtatctataaggtaattaggaagaggatgagttatttagtcccttagtctttgaagcacattatctcatacttcaattgagtttattcttagtgtcattcttctggatgcaatatttgagataaatgtcttaatgaacgttcacctccctccgtagtaatgcctgagtgtcacaaaaactttttttgtttacatacgtagccatctaatggaaacataaaataggaatcaaaagttgagtttcatgtacaaaaggtaaggactgtacatgtggtcataacaacttcaaaagcacctgaaggtaacctttaaggaagatacaaaggctaggaaatatctaggatccatgaagacagacttacttaaggtcatagtgtgtccagagttggttcccgccggtgggttcgtggtctcgctgacttcaagaacgaagccacggacctctgcggtgactgttacagctcttaaaggtggcacgaacccaaacagcgagcagcagcaagatttattgtgaagagcaaaagaacaaagcttccacaacgtggaaggggacccaagcaggttgccgctgctggcttgggtggccagcttttattcccttactgtcccctcccatgttccatttctgtcctatcagagtgcccttttttcaatcctccccacgattggctacttttagaatcctactgattggtgcattttacagagcgctgattggtgcgttttacaatcctcttgtaagacgggaaggttcctgattggtgcgttttacaatcctcttgtaagacagaaaagttccccaagtccccactcgacccagaaagtccagctggcctcacctctcaatagcattaagaatatagtttcacgagcatatatgaatcaaaacttacatttgccaattttatttgcttgtttatgtgtttccaacatgtcttgtcttagggccaaatgtttccctagagaataactattccaactatcttagttgctgtatttttatgcaaccttcaactctccatactaaaatgtctccagaatagaaaataaatcttttcaaagtttcaaaagaggctctctatatattccccttaaaagtaccaggcagacatatttctaggtttctaacattgcgtgttgccaggaagtatatccaaaccatcacaagttattcatgtaaccaagcacacttattggagtgcttctgcttctgttcttgcttgaaattggaagctccttccaggaaaaaaaaaaaatatctatagaaggggaaaaaagtaattttactttgaaaataaaatatacgtgagcaatagttttattctgtttttaatttaccatagcttccaaagacaacattgttttatagtaggggttagcaagtgttttctgtaatgtaaacgtaaagggccagagagtaaatattttaggctttgttttctatactctgttgcaactattcaactctgctgttagaatgttgaagcagtcatagacaatagagaaatgaagatgtgtcattgtgatccaataaaactttatttacaaaaatggcaatgggctagttacggcttgagggctgcagtttgcagactctcacttcagagctaacagttgttgtcaggagtcacttgtttttggaaacctacaatgaggtactataacaccaaaaagagttatcccttcctttttctctctcactttttgaattatgagaagaattagaaatgtagttaatgataatgtccaaccagtgtaattatacttgttagaaacacagctggaagcctgttgtccagtcttatttctcctctgtgatcctcattttcagaggttgaagtcataagtttgccatgtctactttctgacaggggaattataataatgtggagtcaccttttgtttgtgactttgacaatgcttcattgacttactcaccaattttctaatttttatgaagactttttgccgaaatgtagactcagtcttctctcttgtctactctttctataacaattaacaatgaacttatttacctttttaacatctttttaaaaattttctatacaccttgaaaatgtgaatacaaagtaatgctgcatcatgtatattgccttattcacacatagcctcttatggtatatcatataaaaatggaacaatacagcaacaggttgaatgaacagtaatcaggtaacaggaaaatgagatgtctttaatatttcacttaaaaactcaatttcctaaagcatacatataaatatttggaagtatagttagaagaaaaatatctttaaaatattttaattgattagtcttatttataagataatttttaggaggctggttgcggtggctcacacctgtaatcccagcactttgggaggccgaggtgggcagatcatgaggtcaggaaatcgagaccatcctggctaacacggtgaaactccgtctctactaaaaatacaaaaattagccgtgcatggcagcgcatgcctgtaatcccagctactcgggaggctgaggcaggagaatcacttgaacctgggaggcggaggttgcagtgagccgagatcgcgccactgcactccagcctggtgacagagctagactccgtctcaataataatcataatcataataataatttttaggaagcatcagaaatatataagaaaaagattattttcttaattgctttactaaaaacacctctatgatttttcagtaaaacttgattcttatgtcatgtgtgagtgtgatctgcctctcttgggatactactgtactcatgaggagtgatttttttctccaacgacctctttgtcacgtcaacaggtcacaggaatagtgtaccctaaaaagccacctgccacatgctgctgaaaatgtaaaagtacacacatacacacacacacacacacacacacacacacacacacacaccaaaatcaggtatcacaagctgaaaataaaattgagtccaatttttttttaattgagcagttaatgtccttaaaacaaaatcctatactgcaacaaatacttagccagatcattctgatacctccaaactgtggtgtattccaagatacctctatgatctttgatttgatccacagcttttcagttatcatgcaaataccttcaagttttatctcatttctcagtgcaaactcattaaaaattttcagctgaattcaattttataaacatgttgtgaatgtcctctttatataagcaaggttgtaaggaactggccacataaacagaaaattgaataacatatggtttctggccttagtgatctcatgtgtgagttaggcatatgggcaaaatcagaacactatagagtataagtctaaaatggtagtattttataatagaggatgaagagggtgctgtgggatcataggtgacagatataactcccgttgtgggacttgagaaaggcttcacagtctggaaacatttagttgctattgaacacaaaataagactcactgttgagagaagggagagggagggcatttcaatcaaattaagattctgtggcatattcggaaactgatgtttttaaaaagagtaatgtttattacattcctctacataaattatatttctatgtaatatgaatgacaaatatttaacacaaaatgccttataacatttgaatgaaatccatcatatgacctgttatctatttccatttcctttttgctcatatcattatgaacaatgacctgataaattttttataagactttgctgaattagtaaaggattattaagtttagaatgaacaaagctgaccaatcattcaggcaaatttgaccgttttgttgtcgcttttcttatttctgaaaccatacaattccctgaaatgaataagtacatatttgataacttcctaaattaaggctcaaaacactggtaatctactgggctttcatttgttccttctatttgtctaatcctatctatatttctttatatgagctatgaaaatattagatttattaagttgtcctttatcttaatagagaagaatgtttttctatgacattaagaggaatttgatttttttctttaatgatctacttttaattttggtagagtagcattgataagatcaatattacacattgttaagtatgcattacatgttgataagataaatattacacttaaaatatgtttatcaaatgtatgaatgataaaaacgaattctgaaatgtatgggaaagatcttgaataaaggtctatgtacatttcaaggatgtctacatatgcaaattatcataatataataactattgaatatgattatcttcacatactttctttatttttcatctcttagatgaaattgggtattgttttcttatagctggaacaaagcattacagagaattcttagtgtgatttcattgaaactcactgttatatgagttcaacaaagtttaaattagtccatgacttaatcatcctttataaatcctatcactagtattcggtaaggacaaagtcaattaaaaaattagcaacagaagcattaaaagaaggattaataaatacaaaataagggatgtgatatctttacgtattgctgagatgttagtgctaaggaaaaacttccctgttcataatgtgaggtgggaaaaagaagaactattattgtatatttctcctctctaaaactgcctatctgactgtgtttttctgtgtcagccgtattaacagatgtttaattttactcactttagtatataaggcatcataatgtatgaactatttcaaaggccctatgatggctaattaaataaaaatatattaaatattagctggacaaaataaaatatgtattaattttggaaaaagtagatcaaggttttgcagatcttttcatatcaatatattcatttgctgaataagcttttattgtttaccaatattactagttttatagagatgtagatatcaccacagtatgactaattttatagggacacagatagatagatgttattttattccaatcttatttttacatataacaggtataaatatgcgcttgaaaggagtatatcacttaggagtcagtcagaaaagtaaagatcttctagtctaatacagtggttctcagccaggggtgattctgctgcacgctgagggataaattggcaatttctggagacatttttggttgtgacaattgcaggagtgttactggtattcatttggtagagacagagatattggtagacactgtacaggacacaggaaagtctcttacaacaaagaattattctgtccaaaatgtcagttgtggtgaggttgggaaacactggtctggaagaaggaatttactatgaggaactagttacgaaagtatagagacatttaacaagctgaacaaaggatagtgagatggctcagagattagcaactgtggcatgaagccactactacgtttaggtaaaaataagctaccatttattcttatagtaataataataataattattattattattatttgagatggagtttcgctctgttgcccgggttggagtacaatggtacaatctcgactcacttcaacctctgcctcccagattcaagcgattctcctgcctcagcctcctgaatagctgggattacaggtgtgcaccacccctcccagttaattttttgtatttttggtagaaacggggtttcaccatgttggtcaggctggtctcgaactcctgacctcagatgatccatccacctcagcctcccaaagtgctgggattacaggcatgagccaccacacctggcccactctttcttttttaattattgagaaatataaaaatatgtcaaaagtaacaggtgtggtggagttacagcatgcacataatgggatacagcccattatctaatctcagatggaaactagaaaaaaaagagaagatctttgctaaagcacagattatgtggaaaatcatttagaaaaatagcttatcacaacattaaaattaaatcctttagctgatcatttttccttgctattttttcttttaaaattgagaagacagtgagttttttttctttattgtcattatcttgatgtcaaaaaataatatgcacattataagtgggaaaaaagataagtcgaaatgaaatgaaacaatgcgaggaaaaaaatgtcacaacactcttcaattagaaaaaatgacccccatctttcctccaaatagaaatgacgtaactgaagtagtggaactttctcttccatggcaactctagagaaggggtagatggcatgggattgtggacagatggacacagaaagaggcctcatttattgttattgttaaaacttttacttctagtaatagtgacacctccttcagcatttctttatcaattgtcaatattttttggatcaccagcatcaccttctatatgtatgtctagaaacctcctgttatgaatttacacttctcagagtcaagacagaaatgctgtgaattgggcgataaataaaataccccccttttattgccttgctttgtctcttaaagaaagatgcctgttgggggactatgagaatgctttgtgcttctggacctcaagggacaaatctataataaaaattatgcatagtgatgagaaatatatataatgcaagtttgtagagatcagttaacttatcttgtctaggcaattatttctaaacaatgatttcaaatcattaactataatatagcccattcataccctccatttttgtcaaatccctgtcaccttcaaggacttggccatcccataggctgctctgcttttaatagaggaagatgctgtaactcttggtaccattgccagttatgaatttatccattaatgaacattgcatttaaggcataggtttatctccttctccaggtatgaacctgcaggattcctacctgaagcttaagggagaataaatccacctgggacaatcaaggacagatcaaccaatcagctcaaagcaggtgtgaattacacagtttatttgagtgacaaggtagctaaagcagggataataaaagaagggagtgggttgatgtggacagacgaactatggctttaggaaatttggtagggactgaaacatattttgtgtaatttatgtgggtctaatagcttttgaaacttgtttacaagacctgtgtaagtggtactggcatattcatgcatgagaaaacatcaagggaaaacttaatagttcaaggaggtgacaaagaagagaggaaccaattattttcactagccgtcaaaagcaagaaaataatcagcttgagcccttcggggaaaagataggttaaatattaagtaacagtttgttattattccaagtgttttcttaaagttgctcccatactttcctgttttctctgagggaatttagtttttttgttggtttttttttttttttttttataactgtcattggtcagagcttgatttgatgccagtcaaatttttttaaagagattatgaaaactgcttaaactcttccaaagggaagatgggtcattcttaacatgtgtttcaagaggaagagcataagagcattatatggtaaggctgaaagcagatatcagcgtttaggggccatgaagaggtagagctcacattggtaggatcattgactagaattccagagatcaaaattgtatgttagtctagcattggggaggacttgtagctagtatcttcattctagcttgggagcctaggaatcaggttaggcatcttgcacaggaatgggccgatgggctaaaatctccttgagagagatgattaatccaggacaaaccaagcagtcatgccaatgaattactttaacagggtacttcatatcctcatcctttgggcagcacggtcttcagagatggggcaggccccaggctgcagttgagattctataaactaaggtcaaaaagatgcagcagtgaagaagtcatgcttatcttgtataaatcatgttttcttttctttttaatgaaaatgtacatttaacacattttaaaactaaatattgaccctaaaattccaaccaaaaaatgctacataagtggtatttatttttgaatttccctcatgctcctcccactgtggggacaaggagtggtggtggaagagagatcttttagcaaacctgtgagtagagaattagaaggtaatgggaggaaggtaaaaggaaaacatcatagatggataggctcacaaacattaaaggccttcgtgcctgtccttcatgcctattcatccctctccagtatgtgaatcaatgtacttgttaaatattcattcacctcacatatttagcattaaccgtgtatcagggacgttgttagaccgttggtttacgatgatgtgtaaaatatcatttgtaactcagactaactggaagtgctcaatataataagatgtaatgttatggaacactaagtctgtgctgaagacttatctcctttaatcctaaaacaatcctggtgggtagtctcaatgatcatctccaagtcacagttgaggaaattaaggcttcaagaagttaagaaactggaccaacatcacaaaggtagcatcagagtgacagtttgatttcaaagtgtacttgacttcaaggcccacatttccttgcacgtttaatattgcctttctcaggtaaatataccattaaatgtgatacaactctaagcatttgaattacttacaacgtgcagagttaaaaccagcattatttacactatacttcagctcgtttataagtgaactattattttgtggactaacctatgaaatgtaaccacattgaattcctctgttaggtacaggtttggtgattccagggaatagagtatgactgaatgcacaggtaggggtgaagtgaacccggtcagaaaatttagagagcatcgagcagatcattaagcagctgtctttcaaatgtgcagaacacaactcatttgtaatctagggactatctgtattgattcttcccagggaagttacttatttttatacatatgtggtgtgttctgtccataataccattctacatggtaatgctcaactttattatttaaaaaaactgctaataatgaggtttttctttgtatcacagaagcagcaggagcaagttttctttttccttcccagtttttttaagtactgccaaggaatgtgattttgtcagacttgtatttcctattaagccaatctgcatgactgttccttctactagctttacctgttcactcatttattaattcatcaaatatttgtagagtgactattgtgtgccacatactaatataggcacaaggataaccaaaaacagacaaacgctgtcctttcaaggagctcatatagtaatgggaagttaggaaaggagaaaataaatatgtggtatttcaaatggaagtattaaagtgttaagaagaaaagagaaactaacaagatagggaaaaagtgacaggaacatgatgttttattttttatttatatatattttttgagacagggtctcattctgttgcctaagctggtgtgcagtgacgtgatcatggctcactgcagccttgacctccctgggctcagatgatcctcccacatcagcctcccaagtagccaggtctacaggcatgtaccacgatacccagctaacacgttttcttttcttatagagacagagtctcactgtgttgcccaggctgttcttgaactccggggctcaagcagtccacccacatctacctcctaaggtgctggaattacaggcatgaaccaccatgcccagccgaaattgatgttttatatatggcagtctgggcagacctctttgatgtgatatttgaacagaaatctcaagagagggagtgtattagcccgttttcataccgctagaaagaactgcccgagattgggtaatttataaaggaaagaggtttaattgactcacagttcaatatggctggggaggcctcaggaaacttaaaatcatggcagaaaatgaaggggaagcgaggcaccttcttcacaaggtggcaggaaggagaagtactgaggaaagggggaagagacccttataaaaccatcagattttgggagaattcactcactatcatgagaacagcatgggggaagccaaccccatgattcaattacctccacatagcctctcctttgacacctggggattatggggattataaggattacaattcaagatgagatttgggtggggacacaaagcccaaacatatcattttgctcctggcccctcccaaatctcatgtccctttcacatttcaaaaccaatcatgccttgacaacagtactccaaagtattaattcatttcagcattaacccaaaagtccaagtccaaagtctcatctgagacaaggcaagtctgttctgcctgtgagcctgtaaaatcaaaagcaagttagttacttcctagataaaatggaagcacaggcactgggtaaatatacccattacaaatgggagaaattagccaaaatgaaggggctacaggccccaagccagtccaaaatctatcagggcagtcaaatcttacagctctgaagttgtctcctttgactccatttctcacatccaggtaacactgatgcaagaggtgggttcccatggtcttggtaagctccacccctgtgggtttgcagggtagagcccctctcctggctgcttttacaggctggcattgagtgtctgcagcttttccaggcacgtggtgcaagctgttgatcgctctaccattgtggggtctggtggacagtggccctcttctcatagctccgctaggcagtgccccagtggggactctgtgttggggctccaaccccacatttcccttccacactgtcctagccgaggttctccatgaggtcttcattcctgcagcagacttctgcctggacatccaggagtttccatacatcctctgaaatctaggcagaggttcccaaacttcaattcttgaattctgtgtatccacagactcaacaccacgtggcagttgccaaagcttgggacttgctccctctgaagcaatggtccgaactgtaccttggccccttttatccatggctggagtggctgggacacaaggcaccaagtcctgatgccgcacacagtggtggggttgggggggggacctggtccacgaaaccatttttgcctcctagacctctgggtctgtgatgggaggagccgcaatgaaggtctctgacttgccctggagacattttccccattgtcttgcctattaacattgggctccttgttaaatatgcaaatttctacagccagcctctccagaaaatgggtttttcttttctactgcattgtcaggttgcaaatttttcaaacttttatgctctgtgacctcttgaatgctttgctgcttagaaatttcttctgtcagataccttaaatcatctctcaagttcaaagttccacagatctctaggtcagggtcaaaatgatgccagtctctttgttagtcatagcaagaatgacctttactccagttaccaataagttcttcatctccatctgagaccacctctgcctggacttcagtgttcgtatcactatcagcattttggtcaaaaccattcaacaagtctctaggaagttccaaacttttccacattttcctgtcttcttctgagcctcctaactgttccaacccctgcctattacccagttctaaagttgcttccacattttcaagtatctttatagcagtacctcactacctcagtaccactggtcttaactcctgcgctcaagcgatctgcttgcctccacccctaaagtgctgaaattacagacatggtccattgtgccgagccaaaattgatattttatgtatgacactctgggcagacctctatgaggtgacatttgaacagaaatctcaaggaaggggagaaattatccatttacatatttggggaaagagcattccaggtagaagaaacagaaaatccgtagtcttgaggaatgccgtgtatatgcagtatttttcaaacttgttattttgaaatacatatacacttacaggaagttgcaaaagtattaagaaagatcatgagtacccttcactcatcttcagctaatggttacatcttacataattatatgtaatatcaaagccaggaaaccaggaaattgatgttgatacaatctatgctttattcagatctcacatcttacatagctatgcacaatataaaaaccaggaaattgatattaacacaatctatgccttattcagatctcaccagcttttacatgcacttatctgtgtctgtcattctatgcaattttataccatgtttagagtcatataacaactacccctattttgatacatggtactgaatagttccagcgtcacaaaggaactatctcaagccaccctttaattgtcacacccatccaatctcccattctacttcctgaatcactagcaacccctaatctgttctccatctctatgattttgtcttttcaagggagttttctaagtaaactcatttggggaaagaaaggagatgaattgttctagccacggagtggagaacagagagtaagagtacctattgaagcagagggagtcattgcaataattcaaatgagaaataatggtgattctaaaccaggaagctttcagtgaaaacaatgagaggtacatggattctgggtatttttggaaggtagcactaccaggtttgctgatgaatggggtatggggtgggaaagaaagagaagagcccaggatgagtccaaggtggataaggtgaatagaattgagaaaatggtagaaggatcaagttagatggtagaggggtaaaggtggaagcaataattttgttttggaattgttaggtttgaaatcttgttagacatcccagtaaagtcacaaagagtgcagttggatgaaagtatgggattcagggaagaagtatgtgctagagatgcagatttgagagtcatctgtgtggaggtattattcaaattcaagtccccttggaatgaatggctattcaggcagggtcttcataaaaatgcttgttgcatgcctgtaatcccagcactttgggagtctgaggtgggtggaacacttgaggtcaggagtttgagaccagcctgatcaacttggtgaacccccatctctactaaaaatacaaaaaaaaaaaaagttagctgggcgttgtggcacatgcctgtaatcccaggtacttgggaggctgaggcaggagaattgagccaagattgtgccattgcattccagcctgggcaacaagagcaaaactccgcctcaaaaaaaaaaaaaaaaaaaaaaaaaagcttgttgcttcaaattcatgtcagtctgtaaaattatctgggaaggcagtacaaaaactgtcactttgactacgatgtttctggtgacccatcttcattgatcagtatggaaaaggcatgtctctgaaaatctctgagagtctttgatacagcaagaacataaggataaatcattcttctatgttcatggttgtagaggatcttgaatgtttaatggcagaatagccagatcacactctggcacttctgtatgagaggctgagggatgttactgattcaccccgagaaatatttactactaaggggacagaggcaaaggggatacaagacttcaccctgagctgtagcgctccctccttccctatcctgctttcattcttcacattgttttccttctttcttttttattattatactttaagttctgggatacacgtgcagaatgtacaggtttgttacataggtatacatttgccacggtggtttgctgcacccatcaacccgtcatctaggttttaagccccacatgcattaggtatttgtcctaatgctctccctcaccttttccctgtgtccacattgttttctttctttttgaagcctctcattcactaggtttcaatcctgccttgctagtgttctaactctaaggcctaggcaagttatttcaccgaacttagcctcagtgtcctcatctgcaaaatggatagttttatgatatcttcagcccttaaagtcaatggttctgacagctagggtgtactatcttcttggatatcagtcatctcaagcaagccctccttttttggaccttcttttcacacacttcacataccttagagaacataatacacatcctctttactcagggcttattctttataacaggcttcctaattcaattaactcaacttttcaaaaatattagtgactactgtgatgtaaataaatttgcattttataggggtcttagtaacccagaagggagtggggaaaattaatatatattgagagtttattaagtgctaggtactgtaaatattttcttgtatttaatcctccgagtaattctacaacaaagatattatcattgctattatgtaaataaaagaacaaagtagaaagaaacccacggtcttgtataagctcccctagttggtgggtattgaagggagtatttcaatctttggtagcttctgagtttttgttctctcagggaatctgccagatgtccagggcacctgccaaaccctatgaggctataagaaaaccattaagggtcttagattacccagctttttgggagttagaattctgaatgaaatttagtgttcctgcagctacaaaggaattgagttagggaagtgatgactttatctttagctacattggttattttccttataataatcctggcttggtagattagaggcagcccgagtaacccagaatcgctaaaatagaagtgcgagctcattgcccgctgtccttcactatgtttgcatataggaagcaagaataaaacaagcataaaataggctaactagcttgtcagagctcttcacaccaagtctttgtgagttccaataagacactgactattattaaaaagacagagactccacataagtaggaatttattgttttccttttcagtcaccaaaggacaatcctctgcataggttagcaaaaaatggtactgatcctataatctctaatattaaagtttagatttggcaagctgtacatcttatgttgttcattaacaaaaaacaatattgattggtatcttgtactataacttgtactgtgggtcaaattccaatacagcaaataccattgcaataacaattctacaaaactacatcaaaaaaacctttcatgtttgagccaacagcctgatagtgctaaggactttgagtacagtatgctagaagattcttaacagttatttgtcctggacaacaaaggttgactccattaaaaacatagccatcagtgtgggattatttccaaatcaagcttttggaaaagtcaaatgaaagtttgcaagcaggtggggcatggtggttcatgcctgtaatctcagcactttgggatgctgaggcaggcggatcacctgaggtcaggagttcgagaccagcctggccaacgtggtaaaacccccatctctactaaaaatacaaaaattagctggcttttgtggtgcatgcttgtaatcccagctactcaggagcctgaggcacgagaatcacttgaactcgggaggcagaggttgcagtgagccgggatcatgccactgcactccagcccacatgacagagtgagaccctgtcttcaaaaaagcaaaaaacaaacacgcaaacaaaaaaaaaaaaaaccaaagttggaatgcaataaatgttcattgaatgaatactgaatagggagtttcagctaatccactcaaaatagtgctgaatttccagctctaaggtcaatgcttggcatatatatcctgaaggaatgaatggacacagagtaattttttttctaaaatgcaaattcaattatgtcacttcccttcttaaaatccttcagtagcttcccgtagcctccagcatattattttgaatagtgcttctcaaactttgatgtgcatcagaatcacctggggattttcttaattaactgatgctgattcagtaggtctggggtattgtctgagattctgcatttctagcaagtgctcagggttatagcaatgattttggcctgcagaccatactttgggtagcaaagacataagccacttaacttgacataaaagactgtttagacccttagtttctctctcgctctttccccattttgagcttttgctccggttcatgtttttccctgaaaataccgtgatcttacattgtctgtctggatgctgaattttccctaattctgggcctccatgtagttttaggtttgacatcacaaccaccaaaagatttccccttctcccttaatcttggttaatgtcactctcatgtattatactgttaatgaagcattgaggacataaaacttatcaaatattttatcacaatcaatgatggcaccagtgataacatccaaatgcctgggtgagtaaataagaggagaataggggacttgttgttaaactaagtttgcagagaaaaaatgtactgattataattaaattggatgtttatttgttatgacaaaaaaggagctagagtcttttaatccaccccttggcaccactgcttatctccttgtaacatacgtttgattcccatgtctatttcttccatatgggaaatttcagctccctaaacatcaccaatacaacctgttgataagacaaagttaaatttattgcttactatggtaagaaagaccacagcctggacaaagctttggtagtatttcataaggagaaaggtgaggttggatttcattgggagtatgaagcttggtttaagattggtctttcactgtgggggcacaattaggattgggtaaggatcatggtattacaacttagtttggtggaaacagcacagtgaagatttctagccaagaggctcagagactattaaggtgtgaactctattgatgttttttgttgaagagttgatgggagtttggggaagttactttagtgaacagtcaaattatttgcctggccaagagttatctgtaataggaaagttatgctaatgaagacaatggaaaggtaaaccatgttaatgtcgacagccagctatgtgagcataaggggtaggtagctttggtcctccatgtccaaactgtttgtagtggtaagtgatcttcattctcacatagattgaaagcttcctgaggacagggcaatgtctttgtaaactttaaaatatctatgtcctgcacatcacctgccgtagacaagcatctagtaattgacggttgggtagatactgagggaaaacatgcaccaaataaaaatggcaataggacacaaattcactatcatttggaagaataacagtgttttccactgatatttgctacacacagtggggtccacagagcagcagtaccacttgggagcttattggaaatggagactctcaggcaccaccgcaggtccaatgaattaaactctgctttttttaaggtcatttgtattcaattattatttttttcttttttctttactttcgatgcatttttctttatttgtttttgagatggggtcttgctattttgccgagtctggtcacaaactcctgagctcaaatgatcctcccacctcagcctcctaagtagctgggatcacagatgtgagccaccacacctggcttgtatcacattaaattttgaggagcagtgctttaatatctattccattctcatcacttgatgaggtattattaattccacttatggatgtggaagttgaagccagaaagtttaaatgacttgtacaaggtcaaacagcttacaggtagttgagccaagaggctctcaagtcttctgcctccacaaacccctgttcagctgctgccctacaatggaataaaatatactaatcccagagggacaaatatgctaaaaatctcaatattatacactttggaaggtgcaggtgcattatctttcaattctaatttctctttcaagttttctgatgcataaaaatatgaacagcaggtctgagcaatgtttagatgccgtgctttgatccttttgccattcaagatgtttgatttgcattctgccaaggaatgtctggtaacctccatgatgcagaccacaccattagtcaagagagagctgacgtaccttcatctgagagctggctggctgtgagctgctcagagggaaaggatttctatttacaaattgtatcgattatttataaataaaagttccccttgctttcttcagttgtaaaatctgcagttagagagtcgggaagaagatcaaaactgcatacatttgcatctgccaagcctgataactagttccagaattacagaaatggtgctgaaatagcacctcaagtaccaggctctatcaaatttaatctatccataaggcaactgccaattatattttagagaaaaaatgtagactgaaaagatagacaatccaagtagcaactcctgtaaaattatatgcccataggagcaatcttgaagatataaatattggtatgtttctccttcatttatcatttatctgatcatttgacaagtatttattgaatgcctgttaagggtgtagatatatgtggtgaggctgcaggtgtaagtaggtctttctgaggatatgcatgaagttgatgttcataacttggagatgtgtgtatacagactgaggattccttcagtggatattaagaagtggagtaataggcagtaaagaatacactagtcagttgtggtacataaacacgtcagcaccacttaggtattaacttcctgttttgttttgtgtgtgcttaattacgctgtttattaaacaagcacatcataatctgcagatattgtcataaacagcacaataaagcctgccacatcagaatgtcatctatcaaattaggtgtgttcctcagctgtcccgataggcacacacctgtgcctgtaaataggcgcttggcggagattgcttccaggtgtggatctgttgggcgaccttgggatgtagggcactttggaaccttttcctctagcttcaggaattaacctctgggcttggttccatgccagcttgcattttgctttgggacagtaacatgtaaagaatatgcctgtgaatttagggttactgagaagtcctcatagaagaagtaaaatttccttgaggaatgggagtcttttattcaatccaggtttaatgcaaggcttggtgaacagctccagaaggttaataattgcgtgcgtgtgtgtgtgtgtgtgtgtgtgtgtgtgtgtgtgtatccttttgtcattcaaaagtatacgtatacacacacacctgtacagctgatgataaatatacattgtatcaatgagttcaaatgaagtgtgctattcattcactgaggaatgggctattataatgaactattatgatattagaaattgtcagggcaataagcaaataatacatacggttttcaacaaactttctaagtattgttatcagtgggtttgcttaaatctttttttacaaatttatttatttttttgagacgaagtctcgctctgtcgccaggctggagtgcagtggtgcaatctcggctcactgcaaccactgcctcccgggttcaaaagattctcctacctcagcctcccgagtagctgagattacaggtgtgcgtcaccatgcccatctaatttttgtatttttagtagagacgggttttcaccatgttggccaggacagtctcgatctcttgaccttgtgatccatctgcctcagcctcccaaagtgctgggtttacaggcgtgagccaccgtgcccaggcaatagccccattgctcagtgaatgaatagcacactttattttaactcattgatataatgtatatttatcatcagctatacaggtgtgtgtgtgtgtgtgtgtgtgtgtgtgtgtgtgtgtgtgtgttgaatgacaaaaggatacacacacacactcttattaaccctctggagctgttcagcaaaccttgcattttttactttcattacagtgtgtaaataatttagcaaattctaatttgaacctgatatcaattgagcatttaatatttagccaaatatttatcaagtgctgactgtgttctagatgctggggctgcaatttcgaaacagaccattgaggccctcatggagctcacaataaatgatcttccttaaagtatcaggtctctggtttgttaccgtattttttaaattgttaaggaaagaaaaaggccctatctttttgtagacaaacatgccctaagtgcttccagaaataatctccatcaggtaatgcagactgtgtgtggagtgaaattgagtccaatccatgatccagcagagtttcagcccaggatttctttagagcctttgctacacacaaagttggctgatgtgccattcagcatcccagcagctctttctcttcacactagcaatggcaaagctttgtgcggaggcattgctggctgctctgaactaaaagcatccgtggggaccgaaagaggtttttgcacaccttattaaggtaggcaagtgtgtctgagtgtgtgtgtgcctaaaagctggaagacatctgttgagaggaaagtgctcttctgtgggtctggcagcttttctgtaagtcttctattctgatgcaggagcgtgtgagcagtgggtgggaggagatgctttggtacttggaatgctgaggtccggattaagtggtattgtaatagctagttagaggcagaataaaaagctgggaatcaaagcatttaaaaatgcatccttccattatttgctctcaagttaaaccatattcattctaggggaaattaaaaaaaaaaaaaaaacacagcaagggcaagtagcccaaatctgtaaggtctttgagcttctctgttcgtccagcttttgaagtcttcctacagccaatttgtttggctcctctggagggggcaattcatatccacttccctctcctggagcatttctttcttctatactccatcagggaacaatagagtttaacagtaacaggcaattttttttttttttcaaagcttgtgccctcttctgcgtttaaaggtgttttttaagagactcctgctaggggaatcttggcgcctgtgtgttaagacggcaattaacttttagtatcagtgcttacattaaattttctctctttctgctttactaaagcagtcattaaaattcagtgtgagtaccatgaaactttatcataaaaccctgctttgcttagagaaccttgattgttttctgaaagcagccttctcagtttatatatacatagctgccttccttggaatatcaaattgctttgtgtcacattaagaaacactaggttgaacctctatactgtgttttatctgagaaaaatactactgcaaaaagtttgatttgttcaagttttaggatgaaaatttctttgtaacaagttatttgagttgcatactatgtcatcgtatatctctttagttcaagtaattttgcaattaacatacggttatgtaaagaagataatgatttattttttatttatatttttaaaagttattaagtgaggttttcctttcagtaagagtttagaaaaaatagccagaacaagtaactggacttggaagataaagatacctttgcacttctaaattttacctttgtacacttcggttgtgatttaatcattgaaatgcctctgctttgaagtaaatgcatcacttatggtgtatgctgtgttttaataaagggaaaacagttatgggttctctgttgcacatttgaatgttgttattttttgctgtatttaataacctcttttttctcttgtgaggtttactttggaaatgaggcatgttcaaaaataggctgacattcagcttctatgttttaaatttaaatgctgtctgtgttttatcacatctggaatgtgtggggagaaaagataccaagttttattatttagatttaattgtagaattgcagattgatatttttcaatgcattttcattatagtttctgccatggaggcagcgtgagggctttcaggaagatggagtggtgtaattaccaggtgcgcacgttcattaatccttcctggctagagaaagcttcaagttcttctccagtggcccattcgtaaagctataaatatctaaattgtgtcagccaagaagtcacacagaatggtggctctttttgagttcaatttcatgcactgttgctttggtcttgtgaggaaagctctgaattccttaggatagtcttggttgtgaagttccaaaaacaaaatatcaaatcattaaggatttaatttaaaatacatactcttctttcacaaactagatgattgcagtaatgtggattataaatttttttttttgctttatttctttagagctcctctttttattttgtatgatcaagattatagctgagattttggtgatttttttaaaaagatttatggcttatggtccatcagtctctccactacttcaaacctgtgtacccctgtatattatctgcagtactggaatgtttgcattgtatgtggaagctatatacgatttggtaaaaaataacacttaaaggtcttcgctaagagtgcttatttaatcattaaatatcccttaataaaaataattccagagatattgtctgtgtacaaacttaaaaaaagagaaatataaaatactgtgatgtgaataaaatgtatagcaatacactccaataataccattcttatgttttcccttgttctcaactgaaataactaagctaatagagacgtcagtaaggaatgtgttgtttcttcataatacaactacaaactcatctgataagaacaacctgagagtgaacgttaactttcctcattagaaagattcaatttaacacatatatacaaatacatttttaagataatgatatttgcagagtttttgtattctatggagtaaaggagaattatcacatattcaaagtaaaggtataaaatacatcttaatgttttacttaaattttaaagggtccaaaatatactaaaattgtttttctaattctttcctatgtttaaacgtgccagagtcattggaaataggacattctttttcttaagaagattttgcccaaaatatttaaaactattttcttttcccttgattttacaatttcaatattcatggatttttctactttaaaaataacagtagtttttatgatcttaaaacaaatgtttaagggcactttcgctctctggagactataccatccacatatttattatcagcaaaagaaagggcagggcatacttttatttgaagttgagtataaaaatgtgtctgtgtgtgagtgttattaaaaagataagtgaagagacaaatatagaatccaggaacattttcagcctggcttttactctctctaaaaatctaatgaaacccttgagcatctcttatctcaaggtacattaggaactgtccaacactatgatccgatgggagatcagtatattcatataaagaagaaaatttgttgttagtgaaagtcaagtcttttaaaaaaataatagttacagcatttgcaatatacaagcataatagatttactcaacgcccaccccccatctttaaaaaatcaatttccgacagttgtctactttaaaattgaacatatttgctacctggagggaacattgtaatgtagcccatatgtggtatgcatcctgaagaaaacctgaaattatagaggaagttatcctgccttctttcttctgttgaatgagttaaaatatattaacaatttgcctttcactttgtatttatcattttgtatctttgcatatttacatatacattcatgtgtacaagggcatatatactcacaggtcagggctatttaaacagctatttatttgaatatgccagggaaaatctccaagatataaagaagcagttattagatactatgtcagtatagaattaacagccatcttttttaagatggaagagaaaattaattaattacatacaatttctaacctcaagacattttctttctggagacaaggaatactgaggtgctcacgatagtgaagactcaacaagaccctaataaaatagatgaggataagtaaaactacaatagccaataaaaaacaaaaaacaataaaccatgtttcgctggcatgttggtgagtatctctgtaatatctgtcaataagggtctctgtagatttggagtaatgttcaggaactacctgtactagagaagacagtggagaggactccagtggctaaattctgctgcctttgcttccagaaatgtaaataataaggaggtattgtggcatttcctggaagcagtagtcttgtttcatggtctgactgtataagaatgcctagagaaacataacctcagctgactaaactcccttgatgattgtcactttgtcactgaactctgaccataccttttgcctccagaggcaaaagacgggtgaggaagtgatctcctcatctggtttttaaacaagtatataactagagaactggattatctcctaaacccactcttgtccctggaaaaaggggagtcatcctatccgtttcttagccaatttatgtatactcttagtttgagagcatgagaaggaaaactattttcttttcttaccttggctgggtttttaagaatttatttttagtttaatcaaaataatattttaaaaggtagtaagcctctcataagcagtttgatctgttctaaaataacttcaatttttctttttttaaactttcttttatcttacacacaaagtataatagtaatatgtactcactagaacaaatgaaacaggatggagtcacatagagaaatatatcatattctccctatcccctcccttaatattaacatttaggtgtcatgtgcttctccattaattttcattgcaaaggcctaaattttcttccaagagtgaggagtagcagcacggtagtttggacctgatatagctctctttccctagccttttgcttaagtgctttcctaggggctgactttacttacctaaagatgtttcaagcaagggctcacatttttggtagcagaagacacttactgattgctctcactaataattttgaaaggaatgtcaaaatctgggaggatcatgaaagaaatatcagaaatttcctttcagctgccattctccttaatactgttatcaataaattcagcatctcatatgtgatagcaaaaaaggtgctgccttttgttcttgcatcctgaggttcttacctaataccatggtagcaataaagatggtgagaaaattgcttcttctatggtgttcaggtcctgaacgagcaccctcacctccacagacggtggcaggtattcaagcattttacagactttggagttaaatatagcagtgttattctaatttaggtatgccaccaccagcggcaccggcaactgcaataggaaaaatgattggcaatgccagctatctgatgttttcatgtgccaggtgctgtcagttcttcacagtattacattccatcctcacaacaagagagtgccagtgagtgttgctgtgtgccagtgcccaggctaagggctttgaacacattaccctgttttatcctcataactttccacgttatttttattcctgaatgaagaaacaagttctctgtagagatgctgtcattgatccactcatatcctttcacatccgtttaacattttccctgctgtgcttttactcccaacaactagctccctaatcgctctgttggagggtggccttgaggctgccagagcctatttggtctgtgtaaagagagagatggatctatcctggaatttatgtccctgtgtgtgggaagcccttaatcaatgactgctggttgcagacacataaatacgtgagctttcttgttcccaactgagaaattcagaagtgtgaatggcactgccaccctgggcttttatgccatatatgtgtttggtctgtttcccttcccaatctcacttcattttcccttaccagtgtttcttgaaaacacatcccattagatcatttttgcatgaagcttcatctcagaacctccatttagggaacccaaactaagatattctctaaaatagaaactttattgataaagtttccaaactgtcttagtagatggccaatataagaccaagccaaatctttctgggtccaaattccctgtctttaattaatagactccattacaacacattcttcaatctttagtcagcaaacacttaccacgtgcctattttatggcatattatatttataccatagttaggatattatggttcatgaatattttatatctgtacacctgaaattctattgacctctctgggccacagttttgcatctgtaaaatcagcacaataatgctacttatctcatagagtagacttaaaaacgaatgaaatgatatatgccaagtgttgagaatcacaattggcaattactcatgctcattaaatattagctgtttttatgagtattgtttcattttcggtgcataatatcctatgcaaagaacaaaaggtattggtataggcattgaaacttgaagcatagaagaaaaagttaattaaccggtgccccactagatgcctctaactgctggctccgtgtatccctttagccttggctcgtcacgagaaaaccttggagacatttctgctggactcagcagatcaatttaagaaagatgaatgacatttttcttgaaatgtattcagtcatagctgcctttttctactttcatattttggagttcttagaaaaaattaaggactcctttttttaaagaaaatggtataaaagaaaatgcatatcactttgtcactttattattgtaacctcatcaaagtattcagtgtaaagacagtagccaagtgaactcttcttgtaatgctcggaaaccattttagcaatggtaaaattgctgcaatttatattcgtcaaattgcatgatttgacttattttagaaaagttattaacttctgaagagaatgcttcagaagcatttaaatgagtacaagttatcaccagtgatatacataaatttcatttcaaaatatacttctagaaactgtacttagttagctatagtatttgtacaaggattaattcctatttcattttgtaggaatttatttatgaatgtctatggcctgccagtgtaaagcagacttagagcatcatcttttacaataatctttttttttttaatcaaaggggagatattctggtaaaacaaaacaaaacaaaaacaatagtttattctgcatttttattaagtccctctgtaagtcatccctgaaatgggatatgtagagtcttatatttatttatttctcagaagcttattggaggtgatatgaaggattttaagaccctactaactaacaaaacaacaatttaaaattaattttcaaaataccttaacaaatcttattctccttattttcaaattctttaacaatgtttttcttattactaacataatatcttctgatgtagtcataataatatctaaaatgacaggtctaagtaacttacatggattaattgagtcttctaaatagtaaggtagatggcactattacttctatatgagaaatgaggaagtagaggtataaataagaaattttttggccgggtgcggtggctcacgcctgtaatcccagcactttgggaggccgaggcgggctgatcacgaggtcaggagatcgagaccatcctggcgaacacggtgaaaccccgtctctactaaaaatataaaaaattagcctggcgtggtagtgggtgcctgtagtcccagctactcgggaggctgaggcaggagaatggcgtgaacccgggaggtggaggttgcagtgagccgagatcgcgccactgcactccagcctgggtgacagagcgagactccatctcaaaaaaaaaaaaaaaaaagaagaaatttttttgagtgtatacagttagaaaatggcaaaatgggaattcagacccaaacagtaagactcaaggatacctttcttatcagtatgctaatatgaaaacctaagcatactagaaaatctaagtgccagttggaaaccagaattaacattttggtgtgtaactttctggctgctttttctatgctaacaaacatatatgacatacaaaaatacacacatacacaaattcctgttcactacttcttttatgttaacatcacaatgtaccgtacacagctgtattattttatatttgatttcatattttttctaaagtcagtgtatttgtcaaatatcaacttatctatttaataggaatatgggatgatctttgcttatacatacatacatatgtatataaaaacaaaatcaagtattttaagcgttcaccagaagtcatatgtcaatcagtaaagtatataattttttgctgccaatgacatatatcataaaaacgctacctatcatagaatgaaaatgaaacacagcaatattgggacacctattctcaagcaacagctttgtgatttattagctatctcacatgaaataactcattaacttggtattccaagcagcaaaagaaggatcacttaggtcacttgcaaaataatacaaagctaggtttaggggtgggttgcgcttggtgggatgtagatgaaaccatatgggcccttgagtttataattgctgggatctgcatggtgggtatatggatgtttattacagtatgctagtgagttaagaaagaagaggaattattattgacttacatcatagagtttatgcaaaaattaaacgataatttatttttaaactctagaggtataggtaccatcatgaagggacccacagaactgatgtagccagtaattattggagctggaacagatactctgctgtcagttgttctggttttgtggtcattgttcttgcctttgcaagttaccaactctaagaccttgggcaatactttaagtcttggttgtctcatctgtaaaatggggagagcagtaagtgtcttaaaggtttattctcatgttatatgacttacggtatgtaaaacatctgcgtttagacacatagagggtgcttaatggatgattgctctcattattaggctacatctaatctatgaatttaaaaactgtatagaaatatgtgacagattctttaagagccaaataccaactacagtgaaaaatacttaacacttgctgagctcttagtatgtgtcaggcttaactaccttaatgctcatagcaatcctataagataggtactcttgttatcctattttatatcttctaaaattgaagcaagggaagttaaataataggacaaagatcatacgctatctatccatatatacccatctggctgtctacctgtctccttccatccatccatccacttattcatctacccatccatccactcagttacttctctctctcccaccatccctttccctttccctctccctctccctgtctctgtcactctcctttacttatctatctatcgatggatcggtttatctatcatctatctatctctatcatctatgtatagttgttaataacactaacattttataaattacaagactgaaaaatgttttcattaacttatggtaacaaaagaccacattgtgaataaaaaaagcagtaaacacaggtctctgcacatatgaaagagatgtcctaaacaggaagagatgtcctaaacagtagggatacatagtatcatacaatcaaaacatggcagccctataaaacttacaaagcaatttcatgtaagttatttcatttgactcttaccacaatctatgaggttactatttttatttttctcattttacaggttaaatttaatatggcttccaataaaaaattagtatggttaataaatatcttgacgtcttgctcctataatcctaccgatagtttacagtaattagtaaaataaaataataggaaaaatacctttgatactagtattaaattataatcatatcattaggtaatttcaatttgtgattttcaagaatctgtaatatggtagcttcttcctactgacatgtttgaattcattttaaggcttataattcacaagtaatctatatattatctaaaatgtaaatgcacattcacatggagataataaattagcgtgaaatggctgtattttgctctctataatttttaacatacaggaaatcactgttgtctcaaaaatcaaggaaatatagtatttgaggtgaacttattctttctactattaacacattttaatatagttctctcacagtgcaacagagcaagaagctttcagacacatttgctgctgcaaggagcatgctgtgctgaacttaaaacaccttccctttcaaactccttgggactgtttttttccaagagacttcaaatgcactaaatttagcatccgttggaggcacacccaggcatattatagtgaaagccccaataactgaatgtgttaccactattcacaatgtttatgtgtgtatatgccttatctatgatgtattgcaaattacaaaaattgtgttattattcacagtaacaaaaacacttccagcaaatttctaacagtgatctcttttgaaataacttacatacatgtgtcatgggtcttaaactttgtcacttttatgtttccatcatgttgttttagccagtgagggttttgtttggttttcatttatgattatatactttcaaaaaatagatttcaaagtgtgaatttgattgattgattgactgattcattgagacggtgtttcactcttgttgcccaggctggggtgcaatggtgcgatctcggctcaccacaacctctaccacccaggttcaagcgattctcctgcctcagcctccctagtagctgggattacagatgtgcaccaccacgcctggctaattttttgtatttttagtagagacaggggttcaccatgttggccaggctggtctcgaactcctgacctcaggtgatccaccctcctcagcttcccaaagcactggaattccagacgtgagccaccgcgcccagcccgtgaattttatttttgaaagacaagaatgtccttgcctaattgcataatagtttaacatcatgaagactaaatatgctttttagccatgacaattttatttattattgttttcatttttaattttctcaaagatcctcatcagtgtactctttttggtcttccttataagcgtattttaacaggacataataataagataaatcccaactttttaaagttgtatccgtatgtattactttaaagtgctattaatataaacgaattagaggcaacttttattcaatcagattttaagtaattttaccaaaaatatggccttgataatgtctctgtaacaggttctctgtaatatacatgctgaggattggtttgtctttgcttttgatactattttaattagaaaagtaatggggaatccagacccttctcatttaataatccagagaaaaatcagtccatgttctaatagtttaaatttttctactaaaacccatgtgagaatccatatgagtggaatggagaggagttcagcttcaaagttggcagatttgagatgattctatggcaacagaaatgtgcttgagggaaatcagttgcggcatcttctataattgtgtcacctagattttgccttaggaatttctagatttccatagaacattgtgacctcaaatgctttatcttaataaagaaataaaagcagattagaagaattatttgcctacagtttgtgggagatgggcaagtcttaagagtttattaggtacccagaacgaaacatattttcttgggcctcataatcacattgaaatacaaggatttagttatacacagtgaccagttagtgaatgacagtcttcagtatctagtagacagtaaacatataaagatgtatttgtggccgggcacggtggctcacgcctgtaatcccagcactttgggaggccgaggcgggcggatcacgaggtcaggagaccgagaccatcctggctaacacggtgaaacctcgtctctactaaaaaatacaaaaaaaaaaaaattagccatgcgtggtggcgggcgcctgtggtcccagctactcgggaggttaaggcaggagaatggcgtgaacccgggaggcggagcttgcagtgagcagaggtcaggccactgcactccagcctgggcgacagagggagactccatctcaaaaagaaaaaaaaaaaaaatgtatttttacttttaactacagcgagagaccctggcagcctacagcatacaattagtgttcattatttagattgcatggatttaatgtgaggggtcaattacttgtctaaccagtgagcctagcctcttgctcaatactgcctgcttcatgagggtgaactgtgctggagaaatatattacaggattatctgcagattttttttaaatgagtggttaagtcaaaagttcttgtgaaaattcagagtaataaattattatgaagttgtgtaactaggtaaaggatagtttcttttacacgggtaaagattaacatgaggaggaaaactttagcaatggcatttaattccattcaatatatttatattgagctcctttaaaaatacagggccttgtggtgggtgctgaggacagaacaaaaaccaagtaatacatgaacataacccttgatttcatgatctagtagacctataaaagttgtcgatatctgatgaaaagaaaatggtaaagatattccaaacagtgtatgcaaatccagagataggatggaggggctctacctgaaggatgatgataagaaaaccgtgttgagtgaagggtgatttgtggaattcagataaaatatcagtcttgaatgctgagtgaatactcaatgattgactagatcccatggacagtaatttcttcaattatgacgatgctagtgtttatgactataactatcattctccatgccaggcactttgccatttggtaaatgtatagtgtgctattctaacaagcatgcacagagcttttactttaatgtatccatgagtttattggggttcagaatttaggtaagctttgcaaggtcgtagcatggagtaaaatatctgaaattcagacccatatctaactaagttcaaagactgtacagatatttctcctcctttgtgcagagaaggataggaatggttccatattatcatggacttagtcagatgttttaaaattataatgtcctgtgttaatgaagaagggatgatattcagtgcatattcttaaccgttactttgcttaatgctctcgacttttctgtgagatggatagtgtagataaaatccccaaggggactcagcaagtgcaagtaaaacaatgaaactttaaagccctttgtcaaaacctctctttttctcagaggatggaagggccgtaaaggttggtgaggaaggatggaccatttcctatgtagtcttctgacaatattcaaacaaaaggagagtcagcaaatcccccttgatgtgggaagttttaatacaatttgcagagtgtctctctggagtagacatcctcctctgcaatcgtgtcttctatatagcctcagggctttgggtaggtaatcctctccaaggagagtcctggagagggctgtctaccccccttgcaccatcctctaacattattctatagctcagctccttgtttctgtttcctgccttgtttttgtctgagtctgcaattatgatgtaagcaccatgaaggaaggtatgttgccagtgtttgcatcagcatatcccccgtgtgtagcagcgcaagggatatagtgagccctcaatgtctatttgtagaaaaaagaatgaacgtatcaacgaaatctgatacatattcattgtgtctgttatctccatctctcttgtcctgccttgttatcttgccattttcacaaaaggccccaaggcccatcatttcttgtgtaacttccagagtgttaatttttaaattaaaattaaggctttctacatgagtgtctattatttgagaaaccatgcaagatcgtgtgtgtgtgtgtgtgtgtgtgtgtgtgtgtgtgtgtgtgtgtgttgcactctatattatattgaattctggattttttcttataaataaaattttaaaaatagttctttaaaaataggaataagatgttttaggaggcacagagagcaaaggagaataaaaattgcaggtttggggttgtgcatactaattgccattgagtaaagagagcacactgaggccatttagaagagaattaacgtgttttgtttttgtttttgtttttgtttttgtttttgtttttgttttgagacggagtctcgctctgtcacccaggctgaagtgcagtggtatgatctcggctcactgcaacctccacctcccgggttcaagtgattcttgtgcctcggcctcccaagcagctgggattagaggcgcccacaaccacgccaggctatttgttttttttttttgtatttttagtagagacggggtttcaccatgttggccaggctggtctcgaactcctagcctcaagtcatccacccgactcagcctcccaaagtgttgggattataggtgtgatccactgcacctgaccttatttttattcatttaaaaatattaaatgttactgcatagggagtaatgggcttaacaatgaggtgaccaaaactcctatgtaccatgcagagcaatgtatcaaatgtttttaactataaacttctcaaaaacataaacctaattgttctgcagctgcaggttatatctgccttgtttgagcaaaatttggtggtgaaaatgccttgcttccatttttccttcaataactgatatggtttggctgtgtccccacccaaatctcatcttgaattctactcccataattcctacttgttgtgggagggatccagtgggaggtcatttgaatcatgggggcggtttcccccatactgttctcatggtactgaataagtctcacgagatctgttggttttatcaggggtttctgctcttgcgtctccacattttctcttctgcttccatgtaagaagtgcctttcacctcccaccatgattctgaggcctccccagtcatgtggaactataagttcaattaaactactttttcttcccagtctcaagtatgtctttatcacagcatgaaaacggactaatacaataacctatataattttgaaaagtacttgtctaatagactttcacaatagaaactatatccttatcaactttgaaaagtcattgcttaatgcctttggataactgaattttctaagattattttaattttgaaagttaaattttatcccagtgttgacgatttttgtatgctacttttaaaatattttgtcagtgatttatatctatggtgcaatcttgtaaaaaattaacaatgcaaatgtggctagaccatttaaaaatcaatatgttataattcagcccatttaatcactttagttaaacatcttaggaacaactcagttccatttgagagaagacacagttttctagatgtgtgttgtggcatcatattgctttacaatatcttacataaggtgaattcaaatcatatcattgaatctgttttaaattctgtcatagcttaagattagtgactaaatattggcaggtttatggaagtaggatgtaaacaagacaaaaacaagggtggaacaagtaattttagtatattattcacttgcacagagaaaagtcattcacaccttcttcagctttgtgaagaaaatagactaaaatcctgttgatatagcaactatgttttccgtttcttgtataaaaataaagaaaacttcctattaggaattagccagacattttaattttctctcttctttctctattttcccttacagtctctttgaaggcaggcaaaatttctataaagttttaagaatgttttaagatttttttattgtgaaatattcatagactcacaaggagttgcaaaaacagtacagagatttcctgtgtatacataacccaactttccccagttacatattaaccaaatacagtatattaccaaacccaataaactgacattggcacagtgcaatcaactagactgtagaccttacttggatttcacctgtttttgcacatgctcttttactgtgagtcattatctgttattctatgacattaaccatgtctatagatttatatagttactaccactatcaagataaagaagtgtttcatcaccacaaagtaacttaaaggattatttttataaagtaatgacaaatgtgtcaaaagccattcctgtgttatatagcaagtatgttttgagttattaaaactcactgatcatgtctttcagtgtcataactttgggtttccctccctaactataataatcctgatgaattacagttgatgaatatgagaatatccaactcttcctgactctataaatatattgactgagattgtaatatttatggtgtcttaaggggcgcttgttttattatgatgatgtgaacatgttgagaatagtaagaacagcccagtttagcaaacaggatatgagtcttctatatccagctcaatcgttgccccaacaggggacatctgcctttgctacttaattttccattctggaaaatgtgaagtgtatgagaatgaataatcgtctccgattttccagcacataataatctgaggagagcaggtacagcaatttaggagctgttttcttttggtttccaaaaaaagttccgtccagtggtctaagttagtcgtttactaagtgatagagcaattggctatgctttttgaacggactgataattatgtggatgcagcaaataggatatagacaatgcatctactccattacagtaaaaaagactctgatagcagttaatccacataccaggcacttagcttaggcacagttggaggaaatggaatggtaatagactgtagtatggcatgacaggagctgtagcttgagattcagaattccaactctgcctctcaatatttgagtcctcatggccaagatatgtaaagtgctctgtgcaggtcttggcaaccatccaccacacacttagtatgcaatatctatctttattagtcaaggatctggaaagctagttgatgagacaaatgatagaaacaagagttcattagatgaaataaagtaataaatgatgcaagaatttaaaaaagatttagagaaggaaagggaacagaactcacatgcaagtagagcaactgtgtatcagataatgtgctagctgagttagaaaccatgtctcatattaccctgaaaataattctgcaaagctgtaggtgttatttttttcatttgacaggtgaattcatgaaggcttgaatatagggttaagtgagttgtttcaatgtagttattgattcaaatcaagatctgaatgactctaaatatggtgctatagagatttgaagtaggataaataggatttgaaaaaaagaaaaaatatatagggaaaggaattggtacactgtagcagtgtcataaatgaagcttcagttgtgtgattccagatgatgtatgtgaggcctaatcaaacagctttgtggaatcaaaatttctgctcttgtctccaactggggacgagttggctcgggattaaggtgggcgaccttgggaagactagagtctaagcaggactttagtccctcataagaattatatgaggatgtatatttgcatacaaattcctgggcccaccgagatctgccaaattggaatgtgtggtgatatcacccagggaaacatagagagctgttataattagtcatgaaatatttagtactgaaattatagattatgttaaataatcacttataggggacatagcagggttggcaggttaaccatacagcaaacagggttgtaagtcagggcctagagaattttcaagaggcaggaattctgcagaatgaaggcctggtctcatgcagcaccatggacagctccgaggcactcttgtttctccaaaaacctgaaatcaaaaactttgcttttcatcatgcaacatacccatgtaacaatcctgcataggtactccctagtccaaaattaaagttgaaaaaaaaaactatactttcatttgaatacagttctcttcggctttaccagctctactctggaaggaatatcttttactcaatgaaaggccatcccctgttaatgcctggccaggttctccttatcagtcattcactatctttgtgtgtgagtgactaaacatataatgctatgtttagtggatggagtaagattacctttgcagaggttgtactggcttacccctttggttcttgtagttttcttctattagagttttttccatccctaggtttctatactgttcaaatgggtttaagattcttgaaggtattcctctgaccttgtaatttatgcttgtctcctagcacaacttttttttgtaaaggaggcaccaactatgtggtttgctggcgatggcatacacaaatcaggtgggaggaattaatgagagcagcaattccaatatctggttcttcaagattaacttgtatagtttaattcagcattctaaataagcctcatagatttaaaaatctagaataaacccacatttttaaaaaaagttttatgttatctgtgctgataatgcacgctgtacataataaaatattattttcttttttttaaatttattattatactttaagttttagggcacatgtgcacaatgtgcaggttagttacatatgtatacatgtgccatgctggtgcgctgcacccactaactcgtcatctagcttaaggtaaatctcccaatgctatccctcccccttccccccaccccacagcagtccccagagtgtgatattccccttcctgtgtccatgtgttctcattgttcaattcccaatattattttctaagtggcagtggaagaaacatggaaagttctacttcatccatcggtggattagaatttgtataccatgagatgattaattttcaaaaccagtttgaatctcacaaaataatgaccctgttttttgaaggacaaggcagaacaaggaactaggctgtgccacgttcaagtcacaatctctaacatttgttttgttttgttttgttttgttttgttttgttttgttttgtttaatctctgttgcttgttcactttctcttgtaatctgcattgatttgctacctggctatttgtagattgacttcggctgccaggaatggaatgtttttcataaaggaacatatgccttaatgaaagtaccataagaagggagtagagtgtgaccaattgcctaggtaataagtagtgacaacaatgatattattctagtataaatggaatcagtttttctttgcccagggggcatgataaagaaggcctggctggtatatactaggtgggacacaccaacagtgcctagaatgtcaatggatcaaacctgagggaaccagaagttgaaaagacatatcccaaaagaaagcatttgatgtttaagggttggcttacttagaacacaatgaaaaatattactaaaattaaaactatgattttagctatttttaaatatgacaaattaaatagcagaacattttaataaaacattacttaaggtccacaattttctgtaagtctaatacatgggtcattaaaataaaaaattccccatgatttatggaatcagatttttttaatacaacgaattctaaatggttttataatgccaattccaattaatatcctaattataacatgtcatccagaagggttaatgactaaattttattaatatttgttttctatttattttgatttgtgcagtttatgtgtatagtaacgatagctgcaaattagataccattagcattaaataaggtatatattttaatagaaaattaaagttaagtatttgagctagcctaaaatattcaacaacttaaatttgttttttgtggatcacatttttttgagacaaagtcttgctctgctgcccaggcttgagtgcagtggtgcattcatggctcactgcctcaaccatccaggctcaggtgatcctcccacctcagcctcccgggtagctgaggctactggcgcacgccaccatgcccagctaattttttgtatttttttttagagatggtgtttcaccatctggtctcaaactcctgagctcaagcaatctgcccaccttggcctcccaaaatgccgagattacaggcgtgatccagtgcactcacccctgtgaaccaccattaaatagctaataaaagatgcatgtcaataaaaataaacaacttactagaatgattatgtgaaaatcatttattcttccaaagcatgaattttcaaacacaccttttgttactgttttaagaagggaatcatttccatatatttgcatgtaaatcacttttagtctcagagaactttccataaaagtttttttattactgctgtaaccgatagagctagtggactattaatttaaaaagctgtacataaaaacacatctatagctcaaataatctaggataccttttagtttggggaaatgtagatgaaaatgaagtaattacagaatccttgttaattttcagatttagacagtctaggcaatatctttcaggaatgaagagatatgtgttttttggcatcttggtagagtatattcccattgtaattcttttgtgaagtctagaccagatgtggccataaaaatagacccctactacaataatatatttcatagataatccaataaagtcaaatcttattgcagtaggcttagaactctgtttgcacccatggaatttatatcagtttttggcaaatcctttcatctctgaggatactttttcatctcacatataccctattttctgaacattttgccttcaaagtatacctcatttatcaagaatttctctttattcatctgacttatacaagtggcaataacaacgtctggttcccatgaagtaaccagtgaccctttgaaataatatagcgctggaagaaagaaaaggaaagggagactgatcattcagcaactctttaaaaccatgtcaccgttaaacacatagtttattttatcttttttttagaattgtgaaaacctatattagcatcttcacggatgtctcctttgtttacatccccgcttctgtgccttgcctgcagtagaaaaaaaaaggacatgtgtatccctattccccattgtcttctcattctacatgagaatgagaattcttttaatttcttctctatctacatgaacccacttccattatctgtttgttcagttctttaaatgccctgaagctagctctgtgactgggcagttgaaagttctggacttagcatcaggttaatttgaaaaatacttattgagccaccaccatatgtcagccactactgtagatgttttgaatgtgtcagtgaacaaagcagaaaagatgtatgccctctggattcttgggggtctcaaatagtgaaagacagatacgataagtatattgtatagtatgttcaaaagtgataagtgctgtgaaaaaaaagaagaagggtaaaataagagatggctcatgctggagtacattccaattttaaatagggtatcatggtattcttcattgagaaggtgacatttgagcaaagatctcaaagaatgaggcatggggttgaatcatgtagatatcagcagtaaactcattttgggttcagtaaacagtcaatgcagaattcctaagccatcggtttatctgctgtttggggctggttatctgcagtgtggctagagtgaagtaagtgagagaggtttaggagagaatgttagtgaggtgagggtggacctttgaagccattgtaaggacgtttttctctttctaagtgtgagaagatgatgctgactgagaccagggtgataagaaatagtcatattctgaacgtgtttggaagtggggccaacaaggatttctggatgaattggataaggggcatgggagaaaaatggagtcatgaatggctccaacgtttttgctctgattaactggaagggataaagttgccctaaactgaaataataaagactatagatagaatggggcgattagggaggcattaaatttggatatctgttagacatatcaccagatatattgaataggcaattgaataaatacctttagagttcagcaaaaaaggtccaggttggacgtttaaatttcggaggtgtttgtataagataacatttaaagctgtgatatcagattgtatcactaaggaagaatatagatagaaatgacaacgtgactaaggactctaacattaagaggtggattgacaaaggagaaaacagcacaggataatgaaaaggaatgatcagccaggcatggtggctcacacctgtaatcctagtactttgggaggccgaggcgggcagatcacgaggtcaggagttggagaccagcctggccaacatggtgaaaccccatctctactaaaaatacaaaattagctgggtgtggtggcacacacctgtagtcccagctgctctggaggctgaggcagaagaattgcttgtacctaggagacagaggttgcagtgagccaaaagattgtgccactgcgctccaacctgggcgatggagcgagacttcatctaaaaaaaaaaaaaaaaaaaaaaaaaaaaaaaagaaaagaaaaggagtgatcaatgagatgggaagaaaaacaaaagtgtgtggtgtcctcaaaaactgacgttctattttcaaaacctacattttgggtctccttttactatatcctgactttctagctatataaccaaaaggagaaagcagtaatttttttagatataacatgttaataactctaagggtattcaatgaatctgaataattcagtggtataatgtgaaaaaatatagtattcataggaaaaggaacagaagttagctcaggaaatgacttgaatgaacaccgaagccaaatctccagcgcaggtccacgtattatttgtctcagtggttgaattagcagcaagattccttagtaggatgaaaaaagatgttgtgagcatctgtatctacatgactgaattaaattcctccaacaatgaaatgtagttaacgtagtatctcgaaaagaaccctaagtggaattcagggaacctaaattccaaccatggttttgctgctgactgattgcattcacttcaaatctatcattaacctccttgtgcctcattatcctcatttcaccaaataagaaaaatgaaatattcctccttccctacctcactaggatgttgtggatttaaatgtgtgagaagtgcttgagatgcataaaatttgatggagtgttttattcatgaattcaaggcatctgaagtaatttgaccatgatggacagttgcttccttgcacattttttagagtgacatttccgttactgacccacccatttatgcaacatgttgcctaatctaaatttaggtcaaaacaaattgaccttataggtaagcattatatctattaatattgtatttttgtattattttataatattcatcattcacctattttctcatgcaatatatgttactgaacacatatagattaaaaagccttcatccctaaataacaatgatgggaccttccatttttatatccctctggcatttaaaatgtgcttttatagccatcatctccattgatctctcagtcccttgaggttgatatgacagatatgctttttccattttaaaattacggaactgacagtctcagatgactttaccctccaactactgtgtgaagaagcagggtctggcactgaggtcttctgacatccagtgtagagcactatacttcacaatatggccattggcttactttattacaagcactaaatattttccactgaatacgtaatacctagaggagaatgtcgtgtaaaacagcagcagtagaacagaggattaaatgacccattttcttgaagttatcttagttttaaagggttttttcttcatcactaatgaccatccctgactaagaaattattctcataatacatgataatatctgcgttttccaatgcgacaagaatgttaggatgtctatacatgatcttgacaatccctagctccatcacaatgtgtccaaattcattttatttggctagacaggcatgtagtcttactttcaatggttggctctgctggatgctatgtgatctagaacctgtcacttaccccttctaaacttcaggaattttttatccttaagataacaagaaaactcgtacctgtttcaaagagctgtttgttcaatcacctatccattgattatcttctatatgccaaatgtttttctaggtgctgaattacaggaatgaatcagaagcaaaaagttcttactctcaaggatcttatatgctaatgaaatagatgttaaaaaataacaatttttgtttcattttattttattttattttgttgagacagagtctcactctgtcacccaggctggagtgcagtggcacagtctctgctcactgcaacctctgcctcccgggttcaaatgattctcctgcctcagcctaccgagtagctgggattacaggcatgcgccaccatgcctggctaatttttgtatttttagtagagatggggtttcaccatattggccaggctgttctcgagctcctgacctcaggtgatctgccctccacggcctcccaaagtgctgggattacgggcatgagccagcgcacctggcattaaaaagtaataacaatttttaaatatcaatatgtcttatacagaaaagtgagcagtgtggtagagtgtaactggaatgtgagttgagacataacaccagacagagaagccagagaaggacttttgtttgaggaaatgacatttgaaaaggaacctgaatagtgacagaggcagatacctaaagaatatgttccagacaaaggaaacaaaaagcgtgcaattgcatagtcaacttagcctacttgaggaaaagtgtgagtggattttggtgatggagaggtaagtgccaggagatgaagggagagatctggcatgcatcagatgatgtgcagtcttccgggacgttgtaaagagttgggctttttttgtttataaattaaatgttaagccattggggtttttaaccagaggagttatgtgatatgatctatagttaaattatgtttgttcttggatggagtgtgcattatgggaatttatacagaaacaagatttcacatatatatatatataaaactcagtgtcaatagaaaataataaaaacaaattttatccattgataattctggcattgatagtagtgggtatggtggtaataattgtgtgtaacactcaaactttctgaaaacctacacttgatctgtaaatccaaaagtatatgtagcaaaagccataatctgctcttatttctgcaccacttgcaccagtgtggagtgataaggcaaattattcaggcacctgtgtaagccttcagtgtcctcacccccttgttataactctccactaatattacattggtaaagacgtccctgacctatatgtcactgagacctcaaagaaaagagcaaagctaaagcgtaagggggaaaaaagccagcttaaaaagacttaaaggtttctgggaccaaaaaaaaaaaaaaaaagtctttgaaaaatgagaaaggaaggatagaagaaaagattctcctttggtcaatctggccaacctttggaaataaaaagtattgtgttgcagctaataactatttgtcactgcaggcacttgctgatgtctgccctttaaaatgacccaaactcgttggcctcgaaatcagaagccaaggaaaaaatcttggacataatgttttctgtagaattaccaattttctctctctctctctctctctctctctccctccctctctctctctctctccatatctatatatatatagatgtatatatattttttctgtaggaactaccaattcctatctatagggactgattgagaagtcccttatagcagtttttctttggcttttaggatgcaatgattattggtgagaataactctttcatttcacatttgtcattggcttatttgaatgtaatcctgattcaatcgttatgatctcctttaagtaggaagagaagctggtattacattgtaggattttaattttgtactcatgaaacttttgaaaaacattactcatactcttctgactgtcaaattggcctctaagaggtccacatctcaagaggtatcaagcattggtaactattttttggtgttgttttctcatcataaaatgtacttttattaggtgactttggaaattttattgaatcaatgcatgacactgcctcattctagtaatctgatgaagcaaagctgaaaaacaaaatttgaggattgtcagtatatatacttttatttgcagtcaagagttatgctgcaaaaatggtttattgaagtaacaaaattttagctgatatattaatctgaaagatacagtatacatttttagtatggaaaagatgaggaaaaggaggttctctttcctctaggtatctagagcaaactgtaactgtccttggtatttaatttttggctaaggtactgagattagaggtggggccttagatatgattaattgtcagactgataagctagatatttcattgagtttctgttgtgctctttctttcagatcctctgttcgatgctttgttataaagatttgggcatttcaaaatcttctccatatctggtgtctttccaaacagcaggtcatagactttacacaaagaggaacgacacaggttataagtagaagtgttttaaaccctgagttcctatttcagttttgctttcttaaacatattttccttatgtgataaatgcgagtgttgaatggtgataaataccacccataggctttaaagcctaaatgttgaatttgacactgagagtttaaaggcatcatgaaaatttctccagaactaatgttcaagcaatttaggttttacaggcaactcaatagttttgaatgatgtagttattttgaaaaagtcaccataaaacgctatgtttagggaattggtactttgcatttatcagaagattgtaaatgtcaatcgattggcttgctatttggaatataattttttaaattatagttcaaatcattaggatttaattcatgattttgtactacaaactaaatctatgaaaaatatcagatatttattttaaattagaggcatgtaaaggaaaatataaattttgaaatgccattttactggatttttctcttcagcccaccctaggcatttgttacataaaatatttctgaggaagtcttccactgattttgtaaacaaacatgttttattgaacagttctttgttgactagattaacattgaccattgtatgcaatgcattctcaaaatcttagaagctggttttctttttaatcatataattttacttgttttacagtgaaattaatgcatgtaaaaagtatacctatatagaaagttaaaagaatattgctaactagttactatacttccaaattgcctattttctgtgtcttgcattggacagtagtgattacctctaaaagaaaatggatggtctttgtttcattgaagggatggataatggacataactggcattcttgagcaatgcaattgcaaatacatgtctttgcatttatggtccaatcatcttcttactatgatagcatataattgaaggttcaaataaatgcctcgtcccttcctgtggcatattaaagagaaagaaaaattagaaatactttcaaagctacctcacatactaatggtagagttgtttgagtatttaggtgatttaacaaagctgatgtattttattatgcttgatcattgaggaaaatttatttatcggaatgcttttgagagcatatatattgtcagagataaacacagctggatattaaagaggtaaaaacagattttattcaatacctcgtgaaattaggggagagctgagatccattctaatttgtgcagaggcgacttggttgttttaaggcaagaaggagggagaaggagtgggggttcattcgagttagagaagtaaaaaagtacaaagggctggacagtgtaaatgtgattaggccagctgtgttagctggaagttattgaagttaggattctatcttcccacagagaacaggagacagaggacttatccttcttgatgatgtcatttgaaaagaatggctttcaggtccttgagtgagagacacttctgatttccaagagctacatgttcacaattgtaagcccttttgagtaaatgttctaagaaacggaggtaagagtcctatcaacagatgtgtgttggctagaacaaacattaaattttcctggcagcactgagctttctcaagcaggcacttaagggaaggctagggtcatcctagggacatggccttctggggctagaaaccatactagagtttagtcaagtcttagtgcaagggtttggacagagttgttaagtgctgagagttctgtatttctcactgtcacaaaggaagatcagaagctcctgatacttttttcatcagtacaattgaatatataaatcctatacacaaaaataaactaagcttatacaagcatattggtcaaggaatgttgctggccttattaattagatagcccagttaaaagaagaattttttaatataattaatgttaaagtaggatgatagtatataaaacgtgtctactgtcctgaatacaaactaaactgtttggtttagcatttacctcaagatctcttaatatcccccaaagggtccctaaaaccacaacttatctttgtgctcatgaagtagagaagagacagttaatagacatttctagctgatagactgttgtagagcagagaacgctctgtgtttttgaaaattaaacatatgaatttgcccctcttcccctattaaggaagaagagtttcttaattgtgcgaacacatcaagtgaactattcaattagatttttgtgacccagggtataaacatctggttaaggttacatatttcaaaggaacaaaacactagaaactcttggttttaaatctcatggctggaggataatttgcagcagagatttatctggcaagcatacagaattgctgagactgttctaaagatgtaagtgtgggtgtttgtgtcgtgaaaatagctgtttacatctattaagtggataccgatggttgaaagtgccgtctatgtcaagtttttaccaaatcaacttttgcctcactgtgtcagaccattttacctaatcaacttggactgctaatgtcctttcccctggcaccactatctgtctcttttgcaaagcacagaaacggcatgcatgattgtagtttataaaacacatgtaccaatgtggtctacagcttctgttgagttcgagagggtcagtttctgtaatctcttctggcacagagtcaagaacagcttcactttcctcctgctacctctctacccgtaagtgtgaacccatcactttgctaacactcaggaaggggattacacaaaatagagcaggagccctctgacctgaatatgcatctgagccctagccatagagcttctgattcagtagatctgggatggggcctaaatatttgcatttttaagtgtataagtgatgctgatgctgctggttccaggaccacattttaagaaatatcgataaaggtggagaattaaactgcagctcagaagacctgagttcttgccccagcttgacttttacaatctagcaaatggataaaactcgcaggacttcagttctcttcatctacacagtgagtggttagattggctttgtaatttaaaattaaacagggtttgattctgattcactacacaaggttccaaagaaggaatgatatctcctttcatttcttcactttgtcttctgtccctaggtaatcttatctatgttcctgatttaacctaactaatgtttctgcaaagcttctaatatttacatctccagccctgaaactctcatttgaatgctagtcttatatacatacccccctgcctaattgacatctccacttaaatgtatcagaggcaactcagactcaacaaggaccaaactgaatgttcgaccttgtccttcaaacccgatacacatccaggttcctccatcccagtgaatgacactatccagttaagcaagccaaaagtctggattttttttcctcactcttcctcactgtccgtcaactaccattattaaatctgtcacctggtcctactgatttaaccttctcaatatctctacagtttttctttatgcccattagtatcctagtgcaagctaccatcgtctctcattggaattaacacagtaacccccctacccaccagactgttctgcctacagatagtgtgatatttaataaatataaatctagccttggctagatttctccttcaaaaggttcacattaattttagccttaaaatggtgtgcaaagctttgcatagtctgtcctttgctatgttggcagtattttttactatccctctcatctgctcattctctgtactccaactacactaactttgtttttttttttttttagatttctctaactacagtgctgtaatctctttttcctttgcacgtactattccgtttgtcagggaatctgctcactgtctccacccactccacacactcacgttttcctgcccgtcttaccggtcttgatcggttgtcacttgctcaggaaggtttccctggtcaccccctccacaaattgaattaagtcctcttgctgcatgctgtcctagtgctctttattttcctctcctcatccttaattcagtttgtaattacatgttatttgtgtgaggatttgattattatctgtgtcacccactagatattgggcattctttacttactcaccactgaattcatagaaccacagtaattgtacacaacaaatattcaagagaaatttattgaattgatgaatgaaaagttgtaccttaacatgttcctgacatgtatccaaaaaagagctcccctttggggtctattaggactttggacctaggtaaacgtaaccctagtttcgctcaggtttaaacagtagaaagtaattgggtctcttttgcatgtggctttcctaagggctaaccctgtcttcggaatgagtcaatacagcagagctgttgaaagcagactctagcttcggacaacgttggtccgaatcatggttccgtcatttcttagctgtgtgatttagaataaattaatgttttaaagctttgatttcctcttccttaatctggagatgctaataaagccaacttcgtagaggtattgcgatgagtaaataagcataatttgctgtaaacaccttgcagattgcctgttgtatgctaactaatcaataaattgaagctcttaacatcattatattagatatttccagcattgagtatactatcaggcatgtggtagaagctcaatataaagttttgttaaattgaatagattccatatatggtatttctacagcattatgctccttatttaagtgtctctaagtattttttaagtatcacctcacaaaagacagatgtttaattcattacacatgtgaattgttttagatagaaaataaaataaaaaattcaaacattgaaatcaatagtgtaccttaccttaggattacaccataaaatttctaccaatcgagaataaagtgtacagtctatttcctttctaatacttttaacgcaacaaatgtttattgaacacttactacttctaatctatgacagacataaagatgaataaagcatgccacaatgtttaaaggagctcactatatcataagaaagcggattcacacagacaactctataagataaagtggtaaatttaggctggcctgtgaaacaaaggattataggtatagttaagaggtggaatttattttacttcgaggatttcagttacctttatattctttgtctaacctttcatgtttctctttcttcagaaacagagcacctttttcctgacacattcatttccccctatggagtagagcagttgttttcaaagtgtgggtcccagatcagcatcacggggatggttagaaatgcccattcttgagcctcacaacagacctactgaaacagaaattcttggagagtggagcccgcagatctgtgatcaagccctgtaggcaattctaacgcacactcaagttaaagaaccacgggaagaaaggtccatcctgtaacaagacagatttttttcattagcatcaattttgatcatttatatatatatatatatatatatatatatatatatatatatgcatgctcacaaaaccattcaccttactaggttttagtattccccttcctgtattcatgtggtatgtatgtatacaagatgaacacacatttacctgagacaaggtaagactacacatgtctcatttggggaccagaggctgtaatcttactcaaggtcaaagcgtcttcactgctttctttcactgcttttcaaaagtaaaatttccatgtaggtgtcatttgttttctttttgtgttttagaaaaccgattaaggggtgaagtctggctaaacttagtgtcaggacatttacttagataaaattattttaatttatcttgtaatgttcaatgtgagaagaaaagtccttatgagtagtgtattccttaaataacaacaatttaaaaactaccactgaagtctgtcagagtagttttgcctcatttgtctagataagagaaaaaaggttcacattagggattgcaatttgtctgccaaagtgcagtttatttattcagaaacatttagagaggaatgtgtcagttctgttgcaggcactgtgctgtgacggggagctcaagatgatctcaaaaaatttcacagatggggtgggcagggggcacagagagatgtatttagtggttcagatactatttagactgtggccagcatttctctaaatgcaatccagataacaccttacagaatcatctgggcagcttgataaaagctgtagactcctacccttcatcccaaacctattgaatcagtgtctgtgtgtgaagacctagattgtgactggtaattataccaaagtcttagaagcaactctaggccagtaatactcacatcagaatcagctggagggtttgctataccacagattgctaggttagccttcagagttgctggtccagtaactttggtgcaggtccagattttgcatttccagcaagttaccaggtgatactgatgctgctggccttgatcgtgctttgaaaaccactgctttagctacgctataggaaaaaccatataaggcttttatactggccaatgacttcacaggcctgaattttagaaagcccccttctgcagcttggcctatagattcgaaggaaacagaactaacacaagaaagctagttaggagctagttaaaaatcatcctgacttgccaaggaaaggtgctgaagacctgggtcacagagcaaatgcaaaacactaggactttgtccctagttcaccattaaatcaacttattttctcttaccccctcatattcacgtttactccttactttgtagtggttggacaaaaatcaaataaatctgagaattctaaaatgcacacccttgtttattttctaactcaaatatgccactgttgtctgtgctctgtcaagatttcaacacatctttttctcctgtttgcttttccttttggcatatagtgagtgtgtgtatacacacacacacacacacattttttttgactccttccaatgcccttctgctctccgcagatacacttctgcattctgaataaaaccgaatacatatatatatatatatatatatatatatatatatatatatatatgcacacatattttgaaaaccttatttgaaaagaaagctttcggaggaaacgttatttagccacttaatcgagtcttttactgagggactttttgtcgtcccctaacttcctgtcagcagtccacaggcagcaggaataatgtgggagaagatcaacaggcttatttcaggaggtcaggggccagtgccaccacctgcaggtggagacatcagaagcaggaagcagcccaccagctgcagggagaactccccacagagcctaaccaagatgaagggacttgtaaatttcaaccctcccttttggcttttgtgctaaaaatgtgaatattgaggtctgccctgattaagaactagatacattcctctttgtgactgccacacttccttagcgtattcattttttgtctttcgatctcaagttattattttcaaatgcattgcacgtatctaccatggataccattgcaattggaaggagcaaacgttttgtatgtttacttgacaaagagaagtgactgcccaagccacacagagttctgcacaaatcagtaacttctaacgaacgtttgcacttccgggcttgttctctacctatttcagtcgatgcatttgtattatttacttcaaactccaatactaataatgcctcaatcaggttgcaattgggatttgagcagccagaatttcagaaatttggtttggtccatatctgtgacaggtcagtaaatcagagaagcaagggtttggttgctattataatacattgcttacctatcaatttagttatcagccaaggtggttgttatcatccaaagtggctcattaaccaccttggagactcagtatacaattgcaagtaaccctggaagttgtaaataatcccaactgaatttgtatgagtttggtaaggttaagtggaaaccagctgcttagggccttgattataaatgaagttaggagtggaagaagtaacaaaaccccaggcaaattcattaaacattttttcccttcaactttatgctcacgaatgtgttgagactcttctgaatccataaaacacctttcagcatcatctgggcagcttgataaaggctgtagactgcctgcccttcatcccaaacctactgaatcagtgtctgtgtgtgaagacctagattctgactggtagttataccaaagtcttagaagcaactctaggccagtagtactcacgtcagaatcagctggagggtttgctataccacagattgctaggctagccttcaaagttgctggtccagtaactttggtgcaggtccagaatttgcatttctagcaagttaccaggtgatgctgatgctgctggccttgatcatgctgtgaaaaccactgctttagctaggctataagaaaccatataacatggacaaggcaaatgaaaaggttggaattcttctgaatcccaacacatttgtgagcataaagtcgaagggaaaatgattcttctgaatccagacacatttgtttaaggataaactgttttttccttctgaaaatttaatgtctgattctcgttcattcattcatcaaaagttatcaactatcaactataggtaggaactgtgcaatatgctggtgataaagagatgaaagacacagcccctcccttcaaccagctcctagttgaggtggcaagtcagctgtataatcaagtaattgcaagactgtgcactgaaaagggtgaccacagggtgtgatggccacccagggctgtggaatcagtcccaaaatgaagaatgaaagcagggaagggtaattcagaaagaagaaacagttcgcataaagacccatagataaacatcaatcagatgtggttaagacaaaagtaagtttctggaggctgaggaccttctcagctatatgtttgcagtgcttggtatagggctttatgcatctacatggaagacagaaagggccacatcacagtggacaaggcaaatgagaaggaggcagtatcagaagatgagggtacaccggagatcctagttatatatgggcattgtgttcatctcaggagttactgagtaatgggaccttgactcaaatgaatctcaagtctgtttttgcctaatcttggttttaggactaggattagcatacaaccgcactaggagcctagttatacgaaaggctgcattgcggacctgatacagttcaatatacatactgtcaccttgcaaatagggttacgttagttctcaagactgccaatcctctgtgctctaatccttttggcttttttttttttttttttaactgtctcactctgtcatccaggtgaagtgccctgggatgatctaagctcactgaaacctccgcgtcccaggttcaggtgattctcatgccacagcctcccaagtagctgggattacaggtgctctggcgccaccaggccctgctaagttttgcatttttagtagagacagggtttcaccatgttgcccagactgatctcaaacgcctgacctcaagtgatctgcccgctttcctttggcttttaacactatagagcaagggtccccagccctggggccacagaccagtacaggtcagtgacctgttaggaaccggggccccacatcaggaggtgagctgcagggccgccagcattaccacttgagctccaccttctatcagctcagcagcggtattagattctcataggatcacgaaccctattgtgaactgtccacacgagggatctaggttgtgtgctccttatgagaatctaatgcctgaagatctgaggtgcaacagttttatccccaaaccatcgcctcccacgcacctctccccacaaccccacccgcccctgatccatggaaaaattgtcttcctctaaaccagtctctggtgccgaaaaggttggggattgctgctatagggcgatggttttcacatttgatcctgcatcaaaatttccaggtgactcattaaaatactgattgctgtgccccactcgtaggagttctgataaggtagctgtggggtgagacctgagaatttacttttctaataagttcccaggtcatgctgatattgctttgataaccaaagcaatatcagctttggttatcaatatataaccaaagccacatagagggggagaagttccttgggtttagcccagtgtttactgcgaccaccaaaattgctggagcttaaccatggctcagagagttatgttctgttcactctgtaggctgctattccctgtcaccttttgaactatgatggaggggaagagctgccagctcaggagatttcacttttttctctgcataattgaaaatccagaaacacagggttttgggaaagctatagaacagatcatcagtgatcagtgtttaataaagtaaagcaataaactttactgtgtaaaataggatactttattatataaattttgtccccttcccccacctcacaggccaataaaataatatacttcttgtccctgggtgtaatgttattggaaacctttgaatgtaggagaggcatgggcttgtaagttgcagaaaactgctagcctaggattgagaatttcatggataatccaaaaatagatgattttacagttataagccttacgtgaacttgaggtaagaaaacacaatgcctttatagtcttctcagttgctccacatgccctctgagattctgttctgcccagcctctctggttgtcacatctctgggcattaacagaaagttcacatactctttgtctctgatgataatccttctaggtccatatagaagatccctatccaaaccatcccccaaacaaacctattggttaaatattttctccaccgaaggcactttcttagattctaagtgccctgtaggcaggcttcctctctgatttgggagagtacaaattgcgacaaggttaaatcatagcctgggaatttgacctaaaattcactcttctcccatatgcattcatgaaccttctgctggtttttaaaagaagctacttaatgtcagctcgaagaggttggaaggggttaaaaacatgagcatggcagtaagaagatttatgaaggatctgagaagattatgacttgatcagatggtattttgtcagctagccacatttgtgaagacttgaaaactagggaggcttgtccttctaagagggggcactgctgggacctggattctgtggaaccgtattagtagaataaacaataacctttgcttgtatcaaatgaacttctattctcatgtgtcttttgacatatttttattaatcatatcactgggacctccttgctgaaagatatctccgttccccattctgatgactcccaactaggagtgagatcaaatgaagatggcatggaccatttctccatgtgacagctctctgtggttgccttttaacacttctaatgccctttctcttaagaattcccatttgtcgtctggcactggtgctgtgatcaataaaaatgtaatggagtgaggcttagaaacatgaggaaatttactcaagctatccatttattgatgtgtccatttgtgttgtcagggaagaaaaactttttcactcccctcttaggttcattacttggggggctgcaaattaaactgacgacagatagattggcaatagaaaagacaaagtttattcagagaagtatgtgggagctcacagaaaacatagctcaatgaagttagaatttggggcttatgtactattttaacaagggttttgaaaagaagagtgttagaatttcaagccacaaagttggtgggaaatatgaaagaaactaatgaaaggtaatgtttgttttagtaaagtctgtttatgtaattttcttttcccagcgacaacttctcatctctggtgacaggagtcactctttacccctggtgcaagaaactttccttaaaggaggatttaaaacagttgaattatttcagaaatctttgcttttaggcagatagggggagtacagaaaaagccccttcccgtatctgttgatcctcaaatggctttagctcaaaacaatttttacatcacgatggcataatgtagatctcttcaatgtgttcatttattccacagatatttgtgaagtacatgatatatgccaggtacttgggatacaagaatacataagtatgtccctagtctcgtagaacttacactctagtagtgagctagagaataaatgatattatttattatatgcatacacatatgatttcagatagtgatccatattggaaataaagctggttaagggaatagaaaatgatattgaaggtggacttgtttagattgggtggattggcatggcttctctagggggcagtatttgagcagatatgagagcagatattctccaatttgggcaaaaacattccaggcagaggaaacaagggcaagggcactgagttcaaaagagacttgacctagccaacaaatagcaaggattccagtgtaagagaaggtggggaaggaaggaggtgcaagtataggcaagggcaagatcacacgggatcttgcaggccgtgataaaagaatttaactctttcataattttgacaggacatcattgaagaatttagaaaaatagagtggagatacctgatctgctttcttcaaagagttcattcatcattgctgagtagaggttagactgaaatggaagcaatagtgaatacagggagatagcacaggaagccacgttactagtccacatcagaggtggttcagactagggtggagtggtggggtcagttagagagctggtatttaggatacattttaaagacaaagctgacaggatttgctgtgatgaattagatgtaaagtatgagaataattgagaattatttctaagttctttgctggggaaaagtggaggaggaaaaagttagggtacaaggtgtgatgaaatcaagagtctctcttattatcagagtctcattagatatccaagtggaaatgctggaaagaaagttgggtagatcagtctgaagctgaagacagatactgtgactggaataataacgtaagagttggccggacacagtggctcactcctataatcccagcactttgggaggccaggataggagaattacttgagcccaggagtccaagaccagcctgggtaacacagcgagacctcgcctctacacacacacacgcgcgcaaaaattaatcgggtgtggtggcacatgcctgtagtcccagatactcaggaggccgaggctgaaggatcacttgagcctgggaagtcaaggctgcagtgagccgtgatcacaccgctgcactccagcctgggcaacagagtgagaccctgtctcaaaataaataaataaataatgtggcagtcataggcccttagatggtttttaaagacatgggactggatgaagtcttctaggaggagagtttgggaaaagagcccgagaattgactgcacctttcaaaacaggaggaagaaaaaaaatactcaaaggagacaaaagcaacttctgtgatttatagagaaaaccaggcaagtgggatgaagaaagtccttcatgatagaatcaaaaacagtgtcaaatgttgaaaatacaattagacaaacacaaaagaatagaccattgggttttgcaatatggagctcatacttgaccttgataaaagacattttcactggaagcatgcatcaaaaaactatttgtggtaggttaaaatgtagtaggaggtgaggatatacagacagtggctttcactgtgcagatactgctgctcatgcactaattaaaagacatttgttgagtatctactatgttgtatccattgctaaatagtaacagctgggtttagtcaggtagaacagcatcaaaatcattatagtatcccaagataggtacagtaaaatctgtgaaggaatcagagtagtctcttctccaacagagcgtaagacccagcttcacggagaaggtggtagattagctcatctgggaggctgagtagaagcttgtcattatagagggagaacatcagaagtgtggacaacagcttgaataaccttgaaaggacaaaagaggacggtctgccctggaaatattaagaagtctcacatgattagacacaagatattaggggaaaggcataaggtgaattgagtcaatgaggtcaaagagaagctagctggaggaacaggcgatcataaaatgagtaaaagtatatattcaaagattctttttagaagggctacacaggatggataaggggagagagagagttgaggcacagagacaaattggaaaggtgcaatcataaccagagacatgaaaaacccatagaaatctgatgtagattatgtggtccccaaggttgaacaattaagtacgctttcagttgttatgcccatgatattaacatattttataactgcaataagtgctgaagctaaagataaatacaaacaatgtaattcttattctgtgagaaaatgttgtagctggaagttaaacatgtttcttagctaaagaaaaatattgtgtgatctggattacttaatgttataatttagcaacaaaatgttgacattgagccttgcataatcaaaaaagtagtctattcaataaccacattctcagaaaaaaaacaagaaaatattagaaacaatgataaattatcgtagtaatttaattcagtattctattgttttatttggatttaggaaaggcagaaatgttgaaatattaatatatatccctgtaataatataatttgtgtctgagaggtaggaatgagggcatgaggtcaaagtttgataatgaacttcaaagctataactatgatcaggaaattaaaattggacaataaattcctagaatcgtcaggagttgcttgtgaaatcgagaaaggaaaggatatacacaaaaataaagaacagccaatgctctcaaaggagtctaacttttataatagtcttctgtgttagagctgaactcttctggtttagaaggacactctgttgcctggaaatagggcatggaaaaagtcatcagagtcatgtcatctttcattcttcccatgaacgaaatcgaggccctgaaaagtcacctgtgtttgctgtattttattgcaactaagatgtgcatttttaaattgatacataataattgtacatatttgtgggatacatgtgatattttgatgcatgcataccatgtgtaattatcaaataaggatatttctgtatccgtcacctcaaacatttaccattgctttgtgttgggaacatttcacgtattttattatagctattttgaaatacaaaatagattgtcattaactatagtcaccctactggatgcaccttgtttttaatatttctgaaaacagatacgtctcataggtgatggtgtcacagctgtgcattagttattattgcctgtgcaggtgcaaacgtaactattcatattgttgtcaattaattaaatagttacatttatttatatgcgtttattatactaataaacacaatattgagatagttgagctctagttttgactctgctgttaactagctgcgttactttaatttacttaactaatttggctttcaaattcctgataagtaaaattacaacatgagtttctcctgctataatagcctgagaaatcggtgaaacacatgaattcagatgttgatgctatttaatagcgggattccagatatctacttgccattatgggagggagagaggaggtggactggaggctgtgatttccctaggaggttgttaaaattggccaggtgaggaaagctgagacagaccataaatatgaagcatgatacctagccctcagtgttgaaagaaaatcaaatctcatctttgtggtctaaatatcagtatgatacaatcctctgtgtagacatatcctctgccctattgttttctttctaaaagctaaagcccaggtgtgatcacatccctccgttatttacaaatttctgatgatgatgattcttctaatatctacattccttaccattaccatgatgtccaaaacctattataatctattcgtctccaagtgccatgttgtggtcaccctatgcaccctctaaacccaccatatgaccttcccgctgctacttgaatacagttggccctctacctcgttgtgtctttgcattgcctatttaattgcctttccattctctaaatcactctttcgctggaccagcaacatcagcaccatctgggaattcattagaaatatagatcctcaggcctcatctcagacctgcttgatcagaaacattggagagtggagatgagcagcctgtatttttatcagccctctaggtaatttgatgcacactaaagtttgagaaccactggtctagagcattcttctttaactctcttctaaaaattattagaatgaattcgagggacgggatctccttgaaagccaagaacatttctttgtcatctttctgacttcagggcgtagtacactttttggcccataattaaagctcgataaatgcattctatgccaataaatcagctaatcaaatatattattcatgcccttgaggtatctgaaatttgtttgcagaatgtaatatataactatagagtaacaagagaataatttattgccatagataataaaacaatatcctctgtataataaatcctagcctctgctcaatgggcaaaaacgggactggggtttcagattttaaaaagattattggtaattaaatcacctggagaagcacttgctgcagagatgggacttgaagcatcataataaactgttgtttattatgattcggtcagagctgatggaatcacagggattgtgtgaggtatggaaagtggttgacattgaattccaggctgcacagttgggacttgatatgataaccaaaaagaaagaatgtctggggtggtagcaagctctaaatttagacaatctaggcttatcctaaggagaatatagatacagataactgaagtttgattaaagggaacctggtgtatcacaaatagtaaaaagctgtagttagtctatgcagctatcagctagccacataatacttttgggcaaatacattataaaccaaaagaatgacatggcttatctctgtaacaaagtggctcattgttctttattctactgttatccttaagaaaaaaattttagtaaatttgttatgctatactcaacttcaagaagggatagcgcttataaaaaaattgtttaaagaaacaggcctatttctctttgggagaagccacggagaaacgaaaagaatggaacgtgtgtttctgcccagatggcaataaaatgtagggtaaatttctgtcttttaaaactgtattttttccatccctctgtatatacacatatcctaggactgttataaaatgctgcatgcgtatgtgaaaatggaaccttattgggctgtttgatggacctttaaaatatatttgttggtttggggtacatactagctatgcaatataatccgcattatttcttatgtaaacaatggataaactgtttcacagtccagacatttatttggtcactgtttgtagaatgtctattttatttacttctgaatttgtattccagagatctgccttcaatgttggatacttccactgtaatattctaggagatgctcactttctttttcagcatctgacacagtaccatctgcctcctcttttcttgccacaagtaataacaattttataaaggaggatcacattacagaattataggtggtaaactttctaccaccagatttacccaagaacctgaaacacattttttcaaaaggaaatagaatgtccttcttgtgactacatcggaattttgcttgcagcattatgctttttttttccccctagtgtagctagccatgtggaactgaagccattagccagctcctcatcctataaatgctattacctgggaaaagaggcagaaaatatactctcttctccagttagagtctaaaggaagagaacaatatgggtagttgtgtttaccacaaattgatagaactcctttattttaaatgctaaaaccaaataacttgtttatatgacttcaacattgactatcacacactgttgcatgataacagagtgaaaactacctctattggatttaagtggggaatctatgtctcattctcattctttttttactgtggaaactagttgattccaggatcagccttagctccaacttgccacactttgagttttggtttttcacttgcattgtcacaggaaacttctataggataaatcgaggaagattttactctgcaacgtgttgcagaattaaacatttaaagtggcaaaaccttcgtgtgtaggttgtctccccagagaatgtaaaaatgaattgaaggcagcacctaataggtaaacgacagccaatcaaacaagaacaaatgaaatttgactggcaaaatcaaattgaaaatgtataacgctgaatctcagaatataggaggatgcatagaaactaagctgtactattataaaagtcatagccattgaaaaataatgactggttaatttggttttctttacctcatggatgtgaatggttagattttgatgttggtgttatttgacgtgtgtttgtcaagaagttgccttagtcggctcgcatttaggataaaaaaaatattttaagaaatgtttaagagattatgttggagacattagaaacaaaataattatgcagagggcaggactatcaaaatataatagaaaaattacaccgctcttttatgatttcctcctttttggcatttaacacaaaactttatgattacacacaccacgcactccagaaatgcttaaaggaagatgagaggaaaattcaatagaagtagcaggcatttctgtgaggacagcagaatgatcacttcatctctgtattttttttttttcaaatttctgtatctgtacaatgtcttttccagctctaatattctgtgatttggtaatttccgcactcagattttctttaatgaattttgtatgatattacctatttttataccagatattacctggctctaatttctttttcaccctaggaaataaaagtatcgggtgaatttcccattttcttatgttattgatacaggtctctgttggatatccccacgattaactttcctgcagcatgttcgatggtggcttaaagaagaaaccatgtatcagagccccttgtctatatagacttttagataaagagaaatacatatcacagaattattctgggcgcatagagtctctaaatgcaaaaaaaaaattgtattgtagctgttgattcttctcagatagattgagtgtagagagagagcattccaaaaactgagcagaagaaacacagtctgaatcaaataacatgaaattttagctaacaagtaaataacacttttttcagaatatgcaaataatattggtttattatgaaaaatgtataggctgatagatgagcatagagaaaaaattataaatatcttctttaatatcactttccccagcaaaccacttttaacattttgatacattttcatgttcaaacatttcctaatagtcttttttcctgttatataaatatgaattttaaacattcgtatgtttatgaaaaggcaataagatactgctcttttataacaggctttctgaacttcacaacatgcagtgtattctaacatgctccttgtgttcttaactaataaaaaacctcacgttatttaaaaaaccatcttaaacataattatccattaagagaagaggttggggtagagagtttcagactatcaatatcaaagttatattttctgtaagtattttaatttttaagtgtagctataggtatatgattataaaaccaatagcagagaaaagataccacctttgaatatagttttccttggttccatgaaaatggcctcctttctttttgccagtccctcagtatcattaactcatttttctgtaaatgccatcattgtatcacatgtcctcaggaaaaggcacttttctcttttaagctagtgtttgttcttgttctaattttatggcaatttaacgagtaacaatcctgtttctataaatactgtttcctaattaatctattgcattctatccatgagaatttagatgactttctttgtaagagaaatctctgtagcatgagattcttctttgctcttaaatttcattctttcacatttttaaatgacctgatagtattttgttgtatttgtgctgattttttttaaccaatcttaccttgttgaacatgtaagttgtttctaatatttgcaatgatcaaaatgtggatccaacttcactaaagcgttaagaatctaaaacaaaacaaagaacaaaaagttggctgtcatcttgcttggaccaccccgtgagttactattttcttgtttccggtcacagttcatcctaaatcatttcagtacacaaaatgttttttaaagtttgggacagggggtagagaatgtcaattattcctccaaggcagtcatatgagcattgagtatcatgtggaatagttgttacttgtaaagttatggggcatcaaacccagtcaatatgtttctggaattgaaaaagtccctggacattctaatgatactgttgttcactttgcacctactgttaccactactttgatctgtcaacactgcccgtaatggttaattttgtgcatcaacttgactgggctacaaggtgcccagatatttggtcaaacattattctgggtgattctgtgcaagtgttatcagatgagattaacatttaaattggtagactgagtaaagtagattgcccttcctaatgtgagcagacttcatgtaattaattaaaggcctgaatagaagaaaaacactgaccctcccctgagcaaaagggaatcgttctgcccgactgccttcaaactgggacatgggctttttcctgccttcagactttaaccacaatattagctgttcttgtatctcaagtctgctctacttcgattggaactacactatcagctctctcgggtctccagcttgcttgttcaccctgtataccttgggagttgtcagtctccatagttgcctccataattgcatgagccaatttcttaccacatacaaacacacacagagacacacacacacacacacacacacacacacacacatataattatatatgtgtgtgtatacatattctcttattccttttgtttctctaaggaaccctaatatactccttattactctttctactgccttagagatcttcaaggccaagagcgtaatcctccatcctggctctttttcctaatcattaatgatcaactcatagccatttagctcaactaaaaataatttgttcatgaagctttacactcccacatactgaggaacgtggtacctaagatcaaacagtcactgcctcatcaaatgcattcctcttcaaccccatacaaatgtccccagatggaactcacaccataaaaatattagatcccattgacttttctgctttctcaaggatcattgcagagcttgaaaaagatggctcctccctttgcctaagcaggttaacttggtgtaaaagtacatgtaagatttggcacaaaggaaaataaatcagttttgcctgggtcctaagaaacatttccctctgcctcatggtaattgtacctgccagttgattgcattactcaagtggagaccatgaagtgaagtggtagaacaagaagaaatccctataattttattaagtatggtgaaaaatacagatatgtagagaaatgactgggattagatggagcaaaacataattcgagatcctgatacaaattgtacttcctggctcaagggagggagcagaacattccctgctacatgggaataataataaatgcctgataaaaatgcagatatatcatagactacagaagctgaagtggattcttatggtcccctactcagacagcctctccttcagatgaagaaactgaagcacagaaagctcatcctagtgtttcatattgaaaaacccattcaagtctattttaataacctgttaccaaaaatgagggaaataatttaactttaatgtttcactttgcattacccttttcctgactagacttctatccttttcttgagttgagctcattaactactatgaaattatggttatgggtagaggttaattttatacctgtccatcttctggcatcttatttacactaaaaatcatttttaaatggcttcattttaaaaaatattatttcagttgacattttaaaagacacatcatttatgtactacagaatatgcattttatactctcctttattaattttattattttccaggtagaccaatcaaatgaatcagaaattcttggttagatctattagacagcataagtatgtttttcatcattaaattaagatgaaaacacaattttactttaaagtgtttgacgtttccagcctttataaagtcaacacttaatcacatctgaaatttgcaggaaaaaattttgaaagccttcaattattaacattatttcgggagaaaaagccactttgccgcagaactttcacttttctctcgtgaattaagtctgatacaaattattcattatggtgaagtttaaacataatagagtctagctacttccacaaaaatactattcaatgagtttctacattgacatctaactgaccttgtaattaatgttgtacacgatccttttattatatgctggattatcaaatatgacttattagcagtataaagacacaaagttctgaaatgtaatttatagccatgaaaaggaactgagctttgtgtgacagttaaatttgaagagatcaggtgattattatgaagcatgaataataatgcatattaaactcacgtttttgtttaaatcattaatatgattgttttagaagaaagtctacctctatcatatgggcaataaaatgtgtataagagcaaacatttgtgtatgtgaaataactcaaattaaaaccagttttccacattaattcttacagtttttaaaatttaaatcatttaatgtatcacacatagctttattcattttaagctataaatgttacaatttctgtttaagctgttaatataagctttgtaagagcaattctgtataaatatagaattgtcattattcactaatagctaccatttatttagtgcttgttgagtgcaaaagtactgcactgagatctttgcatatgttctcttaatgttacaattcttacctgaggcatttctgtttctgctggaatatggtctctctgaattgaacaagggaggcatttttggttgttatgatgaaaggtggacactgctggcactaacgtgtgttggtaagcgactagactcttcatgatgcgtaaacagtgtttcctcatacccctgcacattcaaatagaggaaaaccttgtttatagttaatttcccctagaatgtaaatccatttaacatataaacacaaagcgtgttttgtgtggatgttttttactggagcagggagacaggagaggaaatgcagttttgatagttgctgaatttttcaagaatgcagcaattatagaacaatttctagaagtttcctaggagctcttttccatagcagaaaactaggacttaatagccttgcgactcatggtacttgagtgttccatacaactcacctatattcaggggacatttgaaaaattctacattaaaggggattcttaacataggcgcaagtgtctggcatcttcaataggtcttctggtgtggccatgaaaacattcacacgtttcaaagtattttaaaataaaataaaacatatattgttgtgttatgaattattttctttcttttttatatgatggttagatcactgtgcagacaagtttatgagatctattcatttcatttcagggtggtaaatgagggtgttactaaatgttggttctaaaaagggagacattgggtattacagaattcagaacagctctaagccctgtgcacatttagcattagaggacacaggcaaatctggcctccagtcctggcagcttcttcactatgtatatgatgttgggtgggttgctttacctctctagtttttacttttatttctaagctagggctattcatagttctttatcatgtggttactgtgaagtagcaaagcacctgacataattagagcagataaaatgctcaacaaatattgcttatcagaaggattatgtattacctcccgaaatacatcaaaaatatattttccaattcaaagaatatgtagtacaaaaatcatgcctaaattaacagagttgcagtagcccaaggagagaagataatcattattgatttcttcttcctttttgctaagcagttctctgtctctgcctcctcagttgttgtccatcccactcccccactcccaagccctgaactctgaggggtttgctgccgtggccggttctgtagtcattgctgtccaatgatgaaaacacaaaatactgcaacagaacactatgcctgtcagcttagctcccttctttctgctaaatgacactcaatcctattcttttgttctaaaggatatcctaaatgaatagccactggggggaaaaaaggttatataagattgtgcactgtgtgaaactgatgcaaccagatcaatgatgtgaatttctcttaactatttactgggatctagaaacaggtctctcaacttagcagtgtttacgaatataataggccttccttatacatacatctgaagccaatctgagtcaggaagagtcgtggtctgataaatattttgaaaacttgcatttgttctattaaagcaaactgtttattaatagtgtgccttattttttaaagcaaaacatttataaacagtagtcattacaggcacttcagtgtacggagtgatcaattgttagacctttaggaatcgattgtttcgtggagcttcggcttataattgaaatgtcatcagaaggagtgtaagacatagcttcaggagaggccatttatgcgcttttgttttcagctaagttatagagtcatcatgtgaagaaagattcttctcttagtaaaaatcctttaatggttggaataacacttgatatttaatatttctttctactttatatccacatttattcaagtgctaacgcgtgtggggcagcaatgaagcactttattccaacattatagttctcatatctgcgtatgattatttttcatttatcgttagcatatatataatgatgacttttaaagtacactgtattatattcactggaataatgattagctattaataatttgaacactatccaggaaattactgaacatgtcctacaagataaacctcgtatgatattgtctccaaataacagtgctaaccaagaagagtgctaccaagttcaaaagtaatcacagggagtaacctaaatgcagctccgttgggttaaaaatagtttctctaaattatatgttccctaagtttgagatcgatttctacaaggggataaaatgtttttataaattctcagtgataagtcatgtgattaagaacccccaactttttttccaaagacatttgcatctctgatcaaaataacaagatccagtcttagttataaattggggaattttcatcaaaataaggagctactcgttgcataagaagactagtacaacttaaagccaatttaatttcaatgaatgcatgatcagctccattgccaattgagtgtttttcttattcatcagaagatgggttcatcatcgtgtttcatatcaactgttctcaaaccatattgcccatttaaataaatatagatttgtctcgaaattctaaattcatgtcatatttcataaatagcctatggtcctatttattactttaaaatattatagatataatatttttattctaaagtaactgtgttatacaaccaaattattcatttaaatatgtgactttttaaataagtaaatgacttatttaagtaaagtcattaaaattttccagtctgtccttcatccacctgatctttgaatgagttaggaacaatacaggaaactaatacaaacttaattttgattacaaaagatgaaatcattctgttatttattcaacacactatgtgtcaataaaatcttatactgtgaaagaattcgtctaagtccatttgctgttgcttgtaacagaatacctgaaaatgggtaatttacaaagaaaaggagtttacttcttacagttacggaggctgagaagtccaaggttgaggggccacatctggtcagagccttctcccatccaagtactaaccaggtcgaacctcacttagcttccaagatcagataagagtgggcgcgtttaggctggtgtggctgtagacttgttagagcctttttgctcatggggacacagcagagccctgaggcagtgcaggacattacatggcaagaaggctgagtattctaatgtgttcatgtctctcttcctgttcttataaaatcatgaatcctactcccatgataacccattaacctattaatttatgaatggatgaatccattcataagggcagagccctcatgatgcaatcacctcttaaaggcacaatctcccggtgctgccacgttggggattaagtttccaacacatgaaatttgggggacacatttaaactatagcaaaattgtaataaaatgttatatagaagcaatgttcttactgattataattgttatattggtaaagtgttaagtcctctaaccaagggatatatttcagcttattataatagttttaaatttacaattcaatatgaataacatctggtaaaagttcttttcaagaaatgggaaaattagaaatgtttagaagaaaataattcaataaatattaagttcaaactggattcatagtttatgtgaaattctgggaaccaattgcaaggggagaaaatagttacaatagcaatggtgaggatgagaataagagcaggtatcaacgttaattgagggtgtgttatagttctaatcgtgctatgcccactacatgacttttccctgtgtgaggtttccgagcttcttcgtagtaatcctaaattgagctggagagaggctagggtaacttactcacgctcatagagccatagagtagtaaaacctgtatttgaactctggcctgtctgacatcattctgtggtcttttaaaccaccactgcttctccatattaaaactccaaatctaggtgaaaagaagaaaactcagaacatgttctgcaacaaaatataacaaaatataatgtatataaacacttatacataatatcactaatatctttactatgaaaagactctgatacgaacattttacataattcatgcagaagtgttaatcacattgtctgtgatgagctgtgtatgtatctgataaaattctggcaaccagacatcaactcgtaggcatagatctgtaacactaaatatttgcctcgagaaacttaaagaaataaagacaaatgaatgaataggaacatggaactgagtacaagataaaatcctcctaaagcaatcgatgtacttgctgctgcgttattgttctaagcaaaagaagcatggcgaagggagatgtgaagctaaaaacagaatgcttagaaggagatgatagcaggagggaagcaaagatgggaccaagctcccaaaaggcgggctttgaacaaacaaaacagaaagctaagcctttgacggatgcacgggatgcaagaaactttagtcaggaaagaggaggcgaagaaaaaccctccaaagaaaaggtgaacaatattttaataggcaaattgacagatagcaagagatatataccatgctatgttttctcattgcagctgaagacaaactggggttatttatgctttgaaaaagcgtaaatctaaaaaacaattgtggaggaagaagcgatgaaaacacgtgttaatacagaaaacatggctccaaggctttaaacttccttgtgagataaatgcatttacattttccgtagtagctaatatatatatatatacatatatatatatatatctgggaaaataatacacagtgattttctttctttttttcatctacttatgtgagaaaaaagtaggctatctgaaagcttttcagttaaatgaggaagaaagttaggtgatcttgtaaataatatatatgttcaagataatgtaaggcccttgtgtagttttcaaaacttatctttaatagcagtttcttctggggatggggtagttcaaagttgaaatgttagaaagatgttaactttttttcctttttacttctccctttcaggatggaattaacaaatttgattacaaatagatctcagagagaggcaaatgcattgaatccagaagtaacataaaattagatcatgtttagttatgcccgaggtcacatggtgataaaaatgaggataaactgaaattgtctgtgagccagattagtttattttatgccagtcctaggaaaaagacacatcatggtaggatacatcctttttttttttaattatactttaagttttagggtacatgtgcacagtgtgcaagttagttacatatgtatacctgtgccatgttggagtgctgcacccattaactcttcatttaacattaggtatatctcctaatgctgtccctcccccctccccccaccccacaacagttcccagggtgtgatgttccccttcctgtgtccatgtgttctcattgttccattcccacctaagagtgagaacatgcgctgtttggttttttgtccttgcgatagtttactgagaatgatgtattccagtttcatccatgtccctacaaaggacatgaactcatcattttttctggctgcatagtattccatggtgtatatgtgccacattttcttaatccagtctatcattgttggacatttgggttggttccaagtctttgctattgtgaatagagccgcaataaacatatgtgtgcacgtgtctttatagcagcatgatttatagtcctttgggtatatacccagtaatgggatggctgggtcaaatggtatttctagttctaggcccctgaggaatcgccacactgccttccacaatgaacagacacttctcaaaagaagacatttatgcagccaaaaaacacatgaaaaaatgctcaccatcactggccatcagagacatgcaaatcaaaaccacaatgagataccatctcacaccagttagaatggcaatcattaaaaagtcaggaaacaacaggtgctggagaggatggggagaaataggaacacttttacactgttggtgggattgtaaactagtacattcttaacatcaatttattcctaaaagcaatgttcatagggcacactgtaggccatagatttgcctcacaaatttaaaggcctaagccctcaacatgcacagcagtatactcagagactatttgtaaagatgacgattctggaactttttaatgaccccaatcattagcaatgattaaaattaatattcaacattctatatttaccaaggcaataaagtagactaatctattttaaaagggttttaaaatgaagagatgaaacaaaccaaatgattttgatttaaacttcatgaaaacataagttgcattaatcaggtgattttgttttatgagcattctgattgaagtgatcatatttagccccgggagaataagagaaggtaaagtatgggtatggcactgaatttactgagatgattatattgtttgagttaaagaacttgtattaagaaacaagtatgtgccaaacattgtgctaggagcaagcaatgctaaaattacatgggtagaaagagagaatgaaatatctagaatgagttagaaacatcagtgttttccaatgtggagccctgacttcacatgaaaattctcattttcaaacaaggtagtttatgaaaactggactattagcaagacagggtgggcatgccatcagtatagtacctggtgtaaaactagaaattttaatcatttgtgctttcattttataatcagtaaaatccaaggtaggacaaacttttactttttctgtataatggactgatatttgaattatacccaactttaattttttgccagaaattatgctttattgtttctctaaaatggtactatagatctttatttatttctatatatttatatgatttttacatatatgtgcatttacatgtatatacatccataaactatatacatatatacacataaattacaaatatgtgtacctacgtacatatatatgcatatatcacgcaaatacaggcacattttcaatacccctttttgatttttttccttgaagagcatagcatctgaatttattatggatttatttttaatttatggtcatgttctttgagtgcttttggtgtttatctggttgccccaaactcgctagcattgtaaagaagatgtgcaaagcctgaatctagactgactttcatattgactttattagtcaaaaaaagtagatgaaaatgtaacagtccgtgttaaaaatgggaataagacagatgttcaagccctagcttcagcagtttttagctgagatttactggaagaaaacattttctgaactgtaaaacatgcaaaatgcctacgtgacagacttcattaacattattaaatgctatgatatagtaaaagaatttgtaaactgtcaagtgctttgtcaacattaggaatttagttattataggtatttccatatacatgttgtatttagaattccctttaattttatacttagggttgatttgtattttaactaagtcactttatatatctggtcccattatacaagtatacttttccttaggataagaaagtgatctttatatatgtttatcaacccaaatgcccatcagtgatggactggataaagaaaaggtggcacatacacaccatggaatactatgaatccataaaaaagaacgagttcatgtcctttgaagggacatggataaagctggaagccatcatcctcagcaaactaacacaggaatggaaaaacagacaccgcattttctcactcataattgggagttgagcaatgagaacacatggacaccgggaggggaacatcacacaccgaggcctgtcgcgaggtggggggcaaggggagggagagcattaggacaaatacctaatgcatgcggggcttaaaacctaaatgacgggttcataggtgcagcaaaccactatggcacatgtgtacctatgtaacaaatctgcacgttctgcacatgtttcccagaacttaaaatttaaaaaactttaaaaaaagaactgtagatactgatccaaaaaaaatgttcattaatgggggttaaatgattatttctaagtagactactcttgaacccttgaatctttaagaattttctttgctattgaagccattcaaactctattttattaaagctgtcgttattctagtagattttaaacagtaatacctgaatacattagaaatatgcaaatctgcattacatatggcatctgcagagcagaggagtttggtcatctggactcatgctaaagtctccgaaaaatccgcttgtcttaatgatggttgactcgctaatgctatgcgtatatagtcttattttaagtgattgaatgatgtggctaataacccctctgttagatgcactcagaacctcacctacctgggtcctcagctctccagtgaaatctctactttaagtttattttctaacatggtaagagccttcagtttatgttatgctcaggcccgtcactgtgaataaaatattagaaatggactttttttttttgtatttttttaatggatcccttggaactttaaaaaaattatttatttgagctttctactgttatcacagtgtctcctaagcatggcctcccgttttttgttggtaatataattcttacgttattcaaattagtaaccattatttttctcatggctagaattctggaaactattaggaaatcactgagcataattgaatggctgtttatttgaagagctatgtcaaggcagcatagagttgtattttcttgcaggggctctggagtcaaagagcctgggttcaaaccttggctccaccactttctatctgtggggcattgggcgtgttacatttgtgaaacttttgtttctccatttgtaaagtgaggtttgggggatgattaaaccagataactcatgtgaaatatttaatggaaatgtatttggtaggggatttattatttttaaatttggattgcacatgacacatgtcagggatcatgctatgcattttggatagaaagatggctaagatatcatgcctgactcttaaaaacttacctaatggtaaatgacgagttaatgggtgcagcacaccaacatggcacatgtatacgtgtgtaactaacctgcatgttgtgcacatgaaccctaaaacttaaagtataataaaaaaaaaaacttataatcaactgtagtagaaagagatctgaatggcttgccatttagctaggcacatggtatatgtgcttaattcatactagcagccactacagttgtcatgattaataatgagcttccaactgcacagaatgcttttaatccatagaaaatcaaatcagaaacaagtttttgtaaaattaatgtgaaaggagcaacaattaaaatgcaagattgacatttattttctaaattggttctattttctttcacatttacaaaatttataagaaaattctttatttctatgtgatataaagaactagaatgtactttgatgtgaattattgttgccagtgctgttcaacttttatccataatttactaagcacctacatttagacaaaggcattatccatccctttggggaggatttcagatgattcatacacagacctggtctcgaggaatttaagattttctttggggagggaaataaggactttaaccaactcaagagtacttagagaattttctgaaaataattttatcaatgaaaacttgttatattaaaagaaactgtcattctgacttccacaaatctaggcttgaaactatggataacgagatattttctattactctcactcacgtcattttcacaaagtgaaaaggtacattttaactagtgaaagaatagaggaaatggaagtagctcgaggcagtggacgatgattcaaaaagacagggccctattatttgatcaagttatgcaacgactctgggcctgtttcttcacctctggaaggaggaataatctccaagccctttcagactcttttggtaattcacctccagcacatcttctaaatgccagcattaactgtcctctgatttgtctcatgtttttctagccccatgctctcctgttcgccatttaccctcatgcaaggtacaaattacacccatcatcacaagacacttgctcaagtcccattgcccccttgaagacctgccacacctactctctcaaaaaccatcatttcctgaaagtcctatacagctcatttggtatttacagtgtactgccacaagccactaagcatcgttttgtgaatacatgacttacagacttagcttgagtaaagatacttgaaaatgaacaccatttcttggctatcttcctattttgatgtacccttcaggcctatgaattttagtataatagataaccaataattatttcttggttctttcctgcacatctgaataaccctatgcaaagtgatagaatgtttttctataaggaggtcctacactggagattgtgtatttcttaatgctgttgaaggaagagatgtgtatctaaaataaatagactctaacaaacattaatttatatttctattatctgttttgtgtattgagatatctcacaaaaataactaaacattttggcattattgatattacatatttgccatgaatatttgtaaatgaagaaaaatatatatacatcagtaattatcttggcaaactcttcaattatgcaatattgttacatagattacatatctaagtgaacactggagttttaacaatattgtgtgttcataaatgttttatttattattgccactaattcttattgccatttcaagaactatgtataagttgttctaaaaactattaaagtataggtgaccatggtcactactgcctactttggtaaaggccaaatatgtgaagactttttaatgtgttaacaaacgttgaaggttttttaacctgttaacaatcagtaggactcttgaaattatttcctaagagagtaaattttacaacttgcaaagcatgattaacctcttgtaattataaaccatctcttgtagttatgtagcattttgttaatgagcaaagaaccattgtggttcctttttacatttcttaaaataattctccgtaacctcattgatatctccagtaaatttagataagcttttttttttaaaggagggttaaaatgacattttaaactaatttttcttgttagttatacagagttgaactatctgagggttttattgacagtcataaaaaatttgttattttctgtgaaatatagagaatttaattcattatcatattattaattctgtgggccattgtcttaattctagaggcacaagctgttttcatcccactgaaatagaggaatcaaagtatgttccttgctcaaagcacaaaagtgacatactacatagtatgcttcttgagtagtcgtaaatctcatgtgttaaattacatcccaaagatttcagtatgttttatgactttaataatttatggtaatttctaatctggcctttgttgacctgtcttgctttttaaatttttagtttttcgacaaaataattaacatattttaataatcttccaaaggtgtttaaaatggcattgtatagagatagctgaaggcttttgagcttctgtgttgtaaacactttcttaataaaacatgaattgctaccagatgatccagcaatcccactactgggcatttatccaaagaaaaggaaatcagtatctttgaagagatagctttgttcccatgtttactgcagcacttttcatactagccatgatatggaatcaacctaaacgtccatcagtggatgaattgaaaagaaaatgtggtatgaaacagaaattgctgctttaatttatattaaacacactcatattcttctcagctgttaagtattgagttatagatttaaagaattctattgtgaagactaaagtgactattaaagtaagaaattattttttccattatatttaacttatttcatactttaatgttagcgccaatgagcaagactattgaatacaaaaactaattaagtagtggtgatagtacagtatataagggagaacattcttttagaaaggaacaataacagggagcaatagaaacaatgaatgagtgtaaggtcacttagtgttaaaacagctaaaatatagtacaaataagttgcgttttaatagtgattttatataattacaccttgatgttttatttgttacaagaattgtccaggaagatttctctaaagaccaaaggcactcttcccctaaataactccaaagccagtcctgtgtttctataaaaaaaaaaaaaaaaaaaaaaaaaaaaaaaaagtgaaaataacgtgatgaacatttttgaggaagtataaaaccaaaatactccactgcatagctgtttctgcaggtattgtattgatatattacattattcagctttggagtctccacatccaatgttacatcatcactctaaattaaacatgtatagataaatgaaataaatgagatagcatatgaaaatctcatagcccagcccctgcactatttaaaatagaaataccaaagaattgtattcctcatctgaaagctatttagtggtggtgtttcaaataaaaattccatctactgctgttgcttccattgtatctttttctctgcggtactgaaagagaaagagacccagaaggggccttgtctgaagtgtccctcttttaagctgttgctgctttaagcacagggtggacaaatgtaataggagtttcataaaggtggaataaaccagcggattacggtgtgggtgaatactttcagatgttaaccaggagctctgcttgcatgctgggagttgcccatgcctcttctagattgaggcacattatcatgcacaacctaactccaagaaatcttttaaaccactggaaattgaacccagaacatgtctctaagccagccttttcatcctgacaccgaatcatagcatgagccagtctgtcagggatgctgctgctctctaggcaaattttaaatgttgaaataatgaatcatgttttcttgaaaaccatgtacaccaaagaaaagttagtcattttatagatgatgaatattaacattttcttagacaatctgataaattatcagatctcacttttggctctttttaagacagttatgcctcagaaatattaataaacccccaagcccttatactgatcagtatgttcactactagctatgagaaattcttgaagttcttgtaattattgtattatttccttactttcattttattagtatgtgaataatatttttaaaaattctagtgtatgtcttgtatatattttaacaacatgacttttaattaatgtcttgataacatttcttctagtgtatgttttcagtaacatgattattaactgtaactttaaaaacctgtggattagatgggaccattttaaaatgttttaaacctggaaaatctgatggctttaggtttagttcaagctatagatcacctgtggagaatggaactgccaaaaaaaaaaatagctgtagcagccctttgagtattctaaaatagggatgttatccagagcattggtttctaaagcttccattatttattgatgttgagctttcaggatttagctacaatatttactcaacatctaagccatgcttttttatcagtcatgttttatatcttttataatcaaactgcttatcactgaaaaaaatatataagtttctatgtatctggaagaattctctggtgtttcttagatatggattttgatgtgtggaataagaattcaattcaaggataacagagatgttgtcctgaaaaaaatcgaagaaaatcagcttttctttaacattctgtcaaagctcctgactattagtttatcagcactgttttgccaaaggtgtcttctcttctcttctttgaaaaaaatcatctgctgctgctacgccgcaagtgtgttcccgctgtgcctgagaagatgtgtggcataaaaaaatgggcatggcctgagttaaaagtgctacatttaagccagagctggcttatttattagttgtctaatcataggaaaatgacagagcatgcttttctcttgcaatatccgttgctgaaaattaaacacatgagcagagctttcagagaggttgactggcctctcagacagcacctcataggatggcctgtgttgaagcatctcctttaaccagggtctgtccctcagcattgggttggctcacctagattggattgtcccagcagaaaaaaaaaacccaaaattcagaatcatatccaaaccggaatactctttcattcacattacttgtactaccttttcagaaactggatacctgagtgtgtgagggtaacttagaaacttatctcatggttagaagttttagaattagagagcgatgatcatgaaacggacttcatgatcagaagcaatggagcaaggaatgagatgtctttgaggagtatttccctgaggctgtggataacgctgacgaataatccccaccttaaaagtgggttgaccactctagtagctgtaaggtgggagggttctttcttcagagataaatctgtgctcttcacttgcccatttcccaggttttcatgtaggtagaagaaacacctgtaatctgaagacactcttccttcagctttgttagtgacagggatttaaatatgtctttcacacattttccttagatagttaaatttcacttttcctgtttgtttttctctgaaggtattctaactcccctcctaatggacttctagagctttctaattctatgcaatttctgttgatttgttctggtaaactttgaaggtaatctctgattcaacttcttggagattctatcatgtcatctctgtttattaactttatgttactcatggtttcttgatgaggactcattaaacataatgtaagtagaaaattattaactacataatatttactacgggttgttatttctgatagtagctagctgtaagattccaattgttcttcaaatctttgtctcagtgatctctgtgtagttcttgactacttcaaataacttcctagaaggatagggatttaataatctcttaataggaacacttaacacactgctggtgggaacgtaaattagttcggtcgttgaaagcagtgtggtgatttctcaaataacttacaaaagaattaccatttgacccagcaatcccattattgggcatatacccagaggaatagaaatcattctaccataaagacatatgcacgttgtgtatgttcattgcaacactactcacaatagcaaagacatggattcaacttaaatgcctatcaatgaacagactgaataaagaaaatgtggtacatatacaccatggaatactatgtggccatgaaaaagaatgagatcatgtcctttgcagcgacatggatggagccagtggccattatccttagcaaacttatatggaaacagaaaaccaaatactgcgtgttctcacttataaatggaagctaaatgatgagaacatatggacacaaagaggggaataacacacactggggcctactggagggtggaacacaagtggagggagaagatcaggaaaaataattattgggtactatgtttagtacctgcgtgagaaaataatctttacaccaaacccccgcaaaatgcagttcacctgtatagcaaacctgcacgtgtacccctgaacctaatttaaaagttataaaataaacgtatcttattttcagtacaatacaccacagagtagaagggttaaaagagattgcttctgaggaggtgagatgggggtaaggacagcacaagagcattttggggggtgatgaagctgttctgtgtcttgcctgcgatgatggctacacgactaagcccttgtcagaactcacagaactttacttcaaaaggagcggattttactacacatcaattccaataacaaatactttgtctttaagcaaagggatacctaaatatagcgtattgaatggatctccagaaaaacacatttttcagttcatgtttcagcctaggcctcatctcatccaggaaaccttgtcttgcttgcctttacatacatgtggcaatcagtagtttcttttagggctcggactgaacactcaatgaacttcaatcttagcgcttgtcgtagcagattgacatggtttatttatatgtgtcattctctgtagtaaaaggaaaggatcaaggccattcacttttgtagtgattgtgcatggcagtatttggcacatagtagattattaattatggaacttctgttttcacacacacacacacacacacacacacacacacttcagagctattttcatttaaatatttgctttagtctccaaagcccctctgcctcaacaccaacccttctatctcattattcatcagcttttctcctattacgaaactacttaggaaagcccacttatttagcttatgatggcaaaaataaatatttgtacttttttttttttttttagtcatcgcttcatagaacagcctctgtcctctgcttatgccatgtctgaatatatgctggaggtaaaaagagttcctggttgagagcttcaatttgagaaactatctgagattactttccaggttccaccgtggaacctgtctgaccttgaacaaatgacctcgaacaagtggctgaaatctcttctatttcgtcaactgtaaaatgggggaaaaccatgtctatctcatggggttcatgtgaaggttaagaaattgcttattcagtgtttagcacagtgcctgatatgcataaagctcctaggaatattagctgttattgtatttccttaaagaagcccatagctctatatgccctttcattatatgttttagtagcccaatttaacatatggataaaatatttttaagttaaatgatttgctaatggattgttgaacgagtggcagacacccatattatagacgaaggtcaagtccataacatacagtacatttccccactttcatttcccattaccaaaattcattattctcctgagaaactcattatagaattcatgtcagattcatctgtgtgttcccagcagtgccttatatccagaaataacactgagtcattgtctagatgtagcagaggtggaatcctccaaagagaagcctcagagtggccaggtttgccaagtatagggatgccttgattactggccttactctttatgctcgtgaattcctaagttttattcctcctgtagtcatagattggcttttaagctacaagctgaagagagagaaaacctcttccacctcgttggaatatgtctcttcaatccatttgagccaatttaggacatgagactgctcttagtctagaaccagtcatcaggagaattccaggtctgattgactcggactagcgggtcaatatcagggcaaaaattccaacgcacaacacgatgtatcagtaaggagaacctcaaaattatttcttaacgtccagatcatgttcctatttttatatatctattttctcacataagtcattaaaatgatgtacctgtgcgggtcctttaatgatactcaaagatcttgaattataggctaataactaacttaataagctgcagaaattaacatttctgctacgtttatgtagcattttcccacatgtacttcagaggcttgagaaaagaccctgaaataatgactgaataacagctttactcacttaatttcaaatttgttaattcttctgggaaataccgtcaacatccattttattatttttctcaattacatgtacgtttctacatcagtggataagttaaggagaagaattccctcatgataattttttcatgctcgaaaattttgaatcaattttttattttacattatactctttcctagtcattagaaagggagtggtggttaagataggcaagaatgctttataaggatactactctcgtttcaattcttaacatcaaaaaccttaacagtgtgtagactataaaataaaatatctagggatcagagcattgtgctgaactttgcaggttttttagtcaataatatatatgacgtgttcacagaattctttgtcaacaaagtacttttggagctccaggccatttaagttggtttttgtactttttctttttcttcggaagactttttttgttctatttacctggaagtgtttcttttttggtactgtgaattaaaatgagaccaatctactaggcaggaaaaaaccttaattagattgttgacacagacaaataagaatgtcaattagcatctactgtcacatgcctctccagactgcttctaggatgagtggcctcaagcagctacatcatctttatactcctaaagcatcaaggaaacttggagtgacaattcatatcatgaacacatccacagtgatgatgattgtgcttcttcccccccacccaacaacaaaggatgaatgccaattaatgtattcagttttttgcgtcaaaggctggatcacttgtgcaatgagggtaatcatcctgaccagacaggccatacaatccatattgtgtgaattaaagataatatgcgtgaaacaccttactctggatgtggttcatagcagtagcaaaaagatgaaaactatggtatgctaacattttagagatctgtactctattttaaataattttataaaagtgcatatacaataaaaagtgcacgtatcacaagtatatgcctcaaaatctaaagccagtcatgtaatcagcatccacttcaagaaagaaaacaaaacagtacccctggttcctctttgcaatcattagtctcccaagagtaatcaccgatctgatctgtgacagcatagattggttttgccctactatatttttgctgaattatacaatatatgctctttaatgtctggcttcttagtgcattgtatttgtgtatcagctattctcttgtgtgtagttattaaacaatcattttatgggctgcataatattccatagggtaaatataacagttttattgataacttagctattacaaatagtgctgttgcagacatatattctattacatgtcttttggtataagaatttacacatttcacatgggtgtatacccagaactgagattgctaaatattggggcacattgtatacattttgatttagtagataagatattgccagatatcgtaaatgcacagtttgataaatatagagatttatactttttctagagaaaagccatcaatatcagtgtatgtgtatatatatacgcgtgtgtatatatacgtatatatatacgcgtgtgtatatatacgtatatatacacacatatatatacgtatatatgtgtatatatatacgtatatatatacacatatatacatatatgtgtgtgtgtatatatatatatgaaacaactcagaagcagaaagataccccatgttctcacttataagtgaaagacaaataatgtataaacatgtacacatggacatagagtgtgtagtgataagcattggagactgaagtgtgggggtgtgcaagggaatcagtgataaattaatggctacaatgtacataatttgggtgatggatacactaaaaatccaaagttcaccactatccaacatactcacataataaaattgcacttgtaccccttacattcatacaaataaaaaattatttaaataaaaataaatatgtgtatatgtatgcatacatacatatgcatatacatatgtgtttgtgtgtgtgtatataacttacacttaaaataagcatggatgctgcaatgaatgctcaatttacaagggttgtccatccaaacttgtggcaagtatctcacctctcaagttgttttcttttttcttcatatatttcttgcttttgtctaggaaggaataatttggcttgcctttcaagagtgtacagtcagcatgataacccaaacacttaagacacgtgctaacccatgtggatcccttgagagaaggaaaacagtggtccttttactgggcagatagagcccggggccaggtttcgtggcttgaagatttcagcttctctgcgcctctcagctcagtgcctctggaagcaatttacaacttgtgaggccatactcaaaggccctgttattaattccccgccttccgagaccccatttcagaggatctcaattgctctcagagtgaatttactgtttcctgaattccgtaatcccaatagcaggtctgttgtcctcattagatagcttaagttagagtcggcagtgtaattggcaactgagctactaagtatccaatgcttatgtggaaaatatgttccctattgcaaacaactgatattcatattcaatttggcaccatcatctatctataaagcagatactacttgtgtttattaagttttatcccaaataattattttagtaataatgcttgaaaataggccttggtcatttgcatgtctgtatatggcatatcctgagtctttgtatgtattagaaagatcactcgttttgacttgatggtttaataaaagatgtccctcactttgggcagagacatttgaaaaaggcactccaaccagggacctaagaggtgaatgagatgcagctctgaatcaggtcacacggcctcaggaaggaaacatcttggttttcacatccctcacttctcgatgtcatgtgcaatacacaaatgacccctcaacacacacacaggcacatacacaaacacacactcactcactcactgtattgtctctttccttgactaagtccttcttactaactcaagctctaaagcttttttacttacctaaggtgagtgtgtgaggatttgaggtttcaatattaaaattcagaaacatttaaagttcattttaaatattagtaaaaaaaaatcttgacaaaatacaattatagacaaaaagaaaattcagaatatttggaatttaaggttgaggttacagccctatttatgaaatattagaagaaaaatgctggagagaataaagcaggtttatgagtctgatagaaagcataaccagatgattatgcatatatttgcatatgcaaagctttctaggcaatctgaacatttaaacctacaaatgtggctgcgatgaacagccacagaagagcaggctagaacagaagaggaggctagaacagaagagcaggcagaagttgtaaatgaaatgttaattttcaatggttgatctcccaagtactggaacagatttgtgctgttttcaaggttttggttcaaagaatccagtagtgtattgaattgttttgtggcacttccctgttattttgctttgtaagctacctcaatccatgaagtggctatgagccccttatacaacactgttgatttttttttccttatctacgcaaaagatttttgattcagggccaggcatggtggctcacgcctgtaatcccagcactttgggaggccgaggcaggcggatcatgaggtcaggagatagagaccatcctggctaacacggtgaaaacccacctctactacaaatacaaaaaatcagccgggcgtagtggcatgtgccggtagtcccagctactcgggaggctgaggcaggagaatcacttgaacccggtagccgagatcctgccactccactccagcctgggcgacagagccagactccatctcaaaaaaagaaaaaaaaaaaagattttttattcaggtggctatcagactcattaaatagaagccttaggttaagttcacgggttgctagttggaagcctccatggactatgttcataaaataatagaaaggagttatgcaggacttcttgaaatgttatttaaaaagtcagaataggctttctattacttgtctgaggtcaaatacatgtagtgctttctgaccatttcatccagggtgttagctaggacaataagaggtgcttaaaaattattagattgagtaaatgagaaagcccttagaaacataggaacagaatgacccttgctttggatctaatattgactcccacgcctaaatccctttggagaactcctttattttctcttccatcaagagcaggtataaattaaaaacaccattaaaggggccatctagctcagctgaagctttcatcacacatgtaggggaggtatggttgggagggatctttttatcctttaggtcttcaatttacataggacttttgaataatcaaatagccccaaagagctgatcttaggactagttgtaattgagactatttctccatggggtagaaaaatctagttgtaggaaaactgagaagtagatgtatgttaacctcaaaggctgttttttacaaaggatgttaaagcatcatctttgctcagaaagggagcaataaaacaaatgagtggaaataacaaaaggaaataatggccaggtgcagtgcctcacactagtaatcccaacactggggggctgtggtgtaaggatcgcttgaggctagcagttcaagaccagcctgagtaaaataggcctcatctctacaaaatagatagatagatagatagatagatagatagatagatagatagatagccgggcgaggtagtgtgcccctgtagccccagctactcaggaggctgagatgggagaatcgtttgagcccatgaggtcaagtctatggtgagctgtgctccctcctgccactgcactccagcctgggtgacagagtgagatcctgtctcgaaaacaaaaggcatactttttagatgtaatggaatagagtacttccaaacctggctgcctgctggagttgtattggaagaggttgcacgacttcagtggagatggcctagatgcctgctcagcagtcatctagttaaagcaactaagaacatgtaatatgaaactgcaaaaagagatcgtgtacgtaaaatcactctgggctcctcagatagagtaataaacacaactcctgacagccaaataaaaagagaaataatacagcccttgacttccttggttgctttgacatactaagtaggtgttacaggttgggttctctgggaaacagactctaaaacatttttatttttactttatttgttgttattattattattattattattttagacagaattttgctctcgttgtccatgttggagtgtaatggcacaatctcgtctcactgtaatttccgccttatgggttcaagtgattcttctgcctcaaactcccaagtatctgggattacaggcaagtactaccacgcctggctaattttgtatttttagtagagacggggtttcatcatgttggtcaggctggtctcaaacacccgacctcaggtgatccacccacttctgcctcccaaagtgctgggattacaggcgtgagccactacgcccggccagactctaaaataaagtttaatatgcagaatacttatcagggaatgcccactggaccaatacatattcaagagagggcttagaagcaggattggacagaaagagaagttgagctgtaatgcaggcccaataacagccttagtgttaagcaggctgagagattcagcagttaatgagacagtcaacccaaacagttttataggcatcaaaagtatgatcagcatggtgtcagtttcctgtgtcacttgtcccacagtatgataccaaaattaaagagaccagatgacatgcaacacaagcagtgtgcactctgttgttgagaagccaatttcgtcatgcaattaagcagttttatactctgcagctgtactttaaggggagctgagatggaacatcatatgtctcaccataaccagaaaggcagatgagaaatgttctatcgccacctcccacaaggtaagggacttccctaaagatacagaggtgggtggaatattgccttggtagacttcctctcaagactgcctatcttcccatgttggaaggatcacagagcatttgtcaagacgtgggtcaatctgcagttgaactttgtgtatgtggcctatgtggatacttataatatcattgggcacctccatagagctgtttcccaattgaccaaacatatgggaagcttcagagcttcgaatgacccttcagagtagtcctgagaacagtgagccttactactcctgcattaatcagtcattggatgatagccttctcagaaataagtcatgaccttgtgcaagggggctcttcatggctgggaccacccctaaaactgagagctgaaggctgtctgccaccagcccttccacctgctgggacaagttctttattgaagggaaatctgagtagttcatcagcgtccatcacagtagtcaagccgttcattcttccttcttatgacaacattgtgcttattgttatgtaatccctttccagaacattttaggttaagttttaaaaataatgcatataaatagacaattcaaatactggggaaaaaaagcttgcacttatattgttatagaaatgtgcacacttaaagagctgatttcttctgggtatttacataactttatttaaaaatccatccatttttaattagctgtttttaatatgcagttagctaagatattataagccatatattaggctaatggacatttaacagcttagttaagttcttttaatggaaatgctgacaaacctttgtctgtaattatagcaacactgtgattacagaaggaggtgcctctccttgttgtttgcagccctaaaattccatgtggctataagtaacaaagtccattattagataaacacaagtcatacttggcattacttgcattactcgtctccttgctttatttgaatcattttttaaagttgtaaaatgtttttcaaaactcagaatagtggccagttaataatatgattcctcttatattatgagattttaaaaaatagttcaccagtttctggtggcctctatacccattggcaagtcctagccattgtgaattaagtaaacaattctttatggaaattttttaatccttaaaccctataagtttttattcatcatgtcaggtcacttgtcaaagggtttaacattcagaattcaacaaaagtttatcaaacacctattacaggacgtgcaattttgggcgcactgggatttcagcaattaacaatcaagatatgatttgtatcgacatggatattacattctctcacaggagacagaaaacaaaataactagaaaatatacataaagagactttaaaatggggtaaaattacagattgtgacaggatgaccactttggttcagaatatctaggacatttttttctttttttttcccctccctccctctttcttttttttctttttctttttctttcttttctttctttttctttctgcctttcggagtcttgctctgttgcccaggctggagcgcagtggtgcaatctcagctcactgcaacctctgcctcccatgttcaagcttttcgtgtgcctccgcctcccaaataactgggactagaggcatgcaccaccaggcccagctgatttttgtatttttagtagagatggggtttgaccatgttgcccaggctggtctcaaacttctgacctcaagcgatccacccgcctcagcctcccaaagtgctgggatttacaggcgtgacccaccaggcccaagcaaggacatttttttctgagccatgttatttaaacagagatctgaatgacaagaaggggccagctctgtgatgtaggggaagaaaaatatgttccttctacccttctaggctgcccagctggagtcctacaaagttagagtgacaaaagacagattaacaagaggaaaagcctagaagtttattaaaatattcagtgcacatacacctggtagaaactcagtgatgagtaactcaaaggggtggttagaatgttgggtttatatagcatctgaacaaagaacagtaaacttgtagagaaatgacaaaacaaagaaaaaaggggtttaggtatttagggttgccaaactgtaggaaggtaaatatatgggagaaacatggagtatagtttgtttatgccaagtctatcttgagatcaacttttcgtattcttcatggccataacaatttcccaggagagagggcttatagcagttatcatttctcagaagtttctgcttttatttagacaagggaagcactgggaaggcttctttttgcttatattgattcttacttgcctctaactaaaagtaatctttatgtcaaagtgccatattttggagtggtatatattgatctcctataataacaatcaaaaggaacagtattctaggcaggagtaccactaatgcatagtgtttggtgtaaagacaagttaacatattcatggggcaacaacaacaataagccaatatggctaagacattgaggatgagtgagttggagaagtaggcaatggccagctcatataaagacttgttcgtttttataaattgtttagattttattgtaattatggtggcaagtgattggagagtattagcttcactttgactggcttatcgaaaacggaatgtagggggtgaaagtggaataaaaagaccagtcattaattgagtagtccgtgtgagagatgatagtggcttggacaaggacgattgtactggagagattgaagcgactgatttcagatttgtagtcaacaaggcttaattggtaggagaaaaaaataaatcagtgttaactctttaatgtttaacttgaataattatgatgagggtattaccatttattgagatgtagaatattataaagtaagagcagatttgttcaaaaagtatcaagaatctttatttggacatgctagtttggggatgcttattagagaccctaggaaactgaatataaatgtggattttagagaagagcttagggctggcagatgcacattaaggatctgtctagagccatggcgctagagacctccaggagaacataaatagtctcaagatcaagccctgagacactcagatgtttagaagtggaacagaagagggacatccaatatagaataccaagaattaggaggggaatcaagagagtgtggcaatatgaaagatacaaaaagagtgttgaagggagggagtaattaataaccagcatgttatgaggggctcagtataatgaaaagataagtgactattggatttggcaacatataattttttggtgatctggacaagagcaatttgaacagaatgatggatatggaaggtccagaggagtaggctgagtaaataatataaggtgggaaaatagatacaaagattatagacaactttttcaagaagttttactgtgaaggggcacagcaagctgagacagtgaggataaataatagactcaaggatggtaactttagaataagaaatttcaatctgatgggatttaagtgttagcaaggaagctttaagaagttattttccccattagaatgatctgaaaaatgttttagaacattcctcttatattctattttatcacatttatataactttcagagaattgaaagaggtattaagttattatgaaattttctgagattaataagataacaattataggatgttttcttttagttgaaatacacctactcagcctaatttttataacttcttactgaagtataatatacttcagtagaaaagcatgcctaatataaaggtgcagctagatgaatttgcacaaactgaacacatccctttaaccagcacttagattaaaaacagaaccttgatgatacctcagaggcccccttctgccccttttcagtctctccgtgctacccccatggataagcattatcgtgatttctaataccatagattaattttgccagtttttgaattttatgcaaatggatctatttcacctaattgtaaatatataacattgtcatagcaaggcactcattgccttacactgaaaattacattgactctttgccacaagcttagacttgctttctcattttattatcatcaagcctatagctttcacactataccttgttcctgctcttccctactctatttcttggtagatattctatatcagtcttagagtgcagtttgcagaacccctccatcagaatctcctagggagcttgttaataatgcagattcctaggcccctcccatggtttatgaatctgagagtgaggcagacaagactataccctctcatgcctctataatgtaataatgtcttcctagaatgttctttgctgcatctcttattaaagaaatcttatgggccgggcagggtggctcacgcctgtaatcccagcactttgggagcctgaggcgggcggatcacatggtcaagagatcgagaccatcctggctaacacggtgaaaccccatctctactaaaaatataaaaaattagccgggcgtgctggcaggcgcctgtagtcccagctactcgggaggctgaggcaggaaaatggtgtgaacccgggaggtggagcttgcagtgagctgagatcacgacactccactccagcctgggtgacagagcgagactctgtctcaaaaaaaaaaaaaagaaagaaagaaaaaaagaagtcttatgtttcctttatggccagagcacaacattgtcatgaagtcatctaaaatttcccactagaggtaacatctccttcccctgtctagctcttttaaagcattacctccatttgccttgtatcatagctgcttgtacacctgtctgtctttccgctgaggttataatcctctggagggtcatgactttgcattcctttgtgtctcccattagcagccagcacagtgccttgcatactgttagttctaaataacttctctctctctctctctctctttttttttttttttttttttttttttttttttttgagacagagtctcgttctgtcacccaggctggagtgcagtgcaatggcatggtcacagctcactgcaacctccccatcgtgggctcaaatgattctcctgcctctgtcttccagtagctgggattataagtgtctgccaccacgcctggctaatttttgtatctttagtggagacggggtttcaccatgttgcccaggctggtctcgaactcctggtctcaagcagtctgccctactcggcctcccaaagtgctgagattacaggcgtcagctgctgcgcgcatccctaaataaacttttttttttttggcatgaaatctgtaacactggaaagatgttattgccttagaataattaagagattaaatgtagaatctcaaaaacattcatttttttccatgaaaactttaccaggcctcaagggataggaaaattatgggtacagaattgagaatctgtaggaacttgcaagataaacaacggtttcacaagaaagaccttgttggagagttaaattttcagacagttgtaataacttcacattaaagttttgtcaaaaaataagtatctgcatgttttgtttgccttccaatgccctcattttatttgattttttcccataagtaactatagtgaaagcacgaaaatgtgtttctgtgtttgtgtgcctgtatgttaattgtgactgtttctattgcattgttattgcagaacctaggcacgcactctgtaggcttgggtgctttctccaactgaaaaaaatcctacatatggataaattatttttacagccagtgtttaattttacaagtggtccccctccttctgtttttaggatggcagagagaatacatatttacttaccattatcacttactcatgctttgagcttgaaggaaatgagacagaaaaatgaagtaacattaacttctctctggaactatgtttctcatattagagctttatctgaggagttcacttcctctctcttcaatgctttgttcctctccagtcgattcaaatgtcctcttaaagcagaagttccgaacctctttctgtgacttcaggagagcatgagaatgtaaatataagttttaggactaaattttcaaagactttttccactcagctctcttttcctcttcggtttgttgttgtcgttgttgttgttgtcgttgttgttgttgctgctgctgctgctgtttttccccttccacttccgtaactgagctcttagggtccatctggaatctgattgcaattaaaaaaaaaaaagtttatttttacctccttgtacgtgctttctcctaaagcaggagtcagaagccttttttctttgaagggctagttagtaaatattttaggcttgtcgtctttgtcgcaattactcaactacgctgttgtagtatgaaagcagacaatacatacctgaatgagcatggttttgttcctagcaaactttacgcacagagaaatttggatatcgtataatttttatgtgttgcaaagttgtattattcttttgatttctccccaaccatttaatatgtaaatcccattcttagcttgtgtgccatacgcacacaggcagcaaatgcgagttgtcacacaggctatagtttctgactttatgtcttaaagtaaacagtaataatcattctctttttccaaacagtccactaatctccctttgtattcagcccttgcatagtaaacgccgtttcttcatcatcctgatttttattctgagaaaatactgtatattgttcccatgcactagggttcggggaaatttaaaaggatgtaggatctccttttcattggtcctaaaattgcactggggaggcaggtcatgtttatgaacagataaatagtatcataatataatcatgcatttctatggctagcatttagaactatagcttttgatgtcatgtggtttttatatggttgattatttttttcttatttataaaatgaaaaagtttgagaatttttcatctccttaatgtattcccttatttgagggaaaagtatttacctactacataggaatttatcttaaaattttctttgtctatctatttttatggaatataatcgagcaactattttactaattaatactttaatatcattatgaaaatgttctcatatttttaaccttataagatcagataattgctatgccaatctatggttgaaatgggttcttatacttaacgctatgctctttcttctgagatgtaaaaatatgtttaaatcagaatttatataggtgtcaattcaaaatgacagtagttcattattttgattagtataaatgttcacaactaattctattctcttatctattaagtcaccaaataaagtatatttgttttaaatatttaacagtttaaattattctttgaaaacttatgagtctaaagtaagaacaattaacccattcattttgcaagtgggatagttgaattttacttgcaatccagggatttttgacagtttgaaatatacatacataccatgtatgtttaggaaaacatttaaaaagagggggttgtaaaataataatagttcttccatgattttttagccataatgtttataatataaaatatgtatactcttgttattgaatgtagtatgtttctaatttaccagaaggcaagagaataatcctggagaatttctcaaggcatcttcgaactctttgatttattgctcacatatagtaatttgccaaatgacgccctagtgaactgaaagaattaatgccccgtcctaagtcactttcaccgagggactgaaaacctgcagcattttgccaattagaggaggaaacaatctaccttgcagagtcaggagtactggataaaggagctaagagtgttgctttttttccccttcttactttaaaaatcccaattcatcccatgtctttcttaaaggctaagtgaagtagtaagtacgtttttgcaacatacgaatttagcagactggccttgtgtttatttttggccggaaccattacacttatttccaaccctctcctttatttgttggttgataatgggctaattttgaatctttactgtcaaaagaacattaagagaagcagccctgcctgcatcgcaggctatgtctgtcctttgccgagtattaaacactaaaaaaaaattaagaaaatactaacaaaatgacaaagcattaagaaaataaaactagatgttaaaggaaatgagaaaataggaaaggatgctgtacctggagtgattttttttccccaggctacctaagatgatcaaaaaagagctaatttctcttaggtttctattaaggaattactagaatatcgggcacaccaggaaactttatcagtggacctgtcctgaaccaaattttcttaatgtatatatgataatttgttaccacatcccagattattttacaggaattaaaatatatttgaaacactgacagggaaaattgggtaagacattgatagatactacaatctgtacttgaaactgcactcaaggaattcgttagtcaagaaagaacacaatgactgtgggcccctctgggttttggaacctcttttgtaaagcatttttttttttcccaaatagaagatattatttttgaaaaggttaaataaaaaatctttgttcactatatagtttcctcctaaggagtaaattaatttatataaaatattgcaatataaataacaattttaaaatctcaaaagagcagtgttttaaaaataatgtagaaacattaagaaatgacttcaaatgataagaatgtcattggagagcaaagggtttttaatattacatatcgtggcacgtatatcagcacccaaccgctcaagatacagagttctttacaaaaatcaaacagaaggaaatgtgccaccttgttcataaactatatttaataataagccaggcagataaagtcactttcacaaataatgagcaagcccatggtaatataattcatttacaataagatttatctcatggaattcttagactgtgctttgaaatttaaataattctgataaatgccaacagaatagagaaatcaattccagagcaattactaacacgttgcattacctttctaacattaatatttctcttcatacatatcattgaagagaaaatgaggatggaaaataaaaagatcaggtaatatatttgctttctcatctagggttgttatgatcttcaagatgaagttttattttttactcctagcaaatgatattcttttttattttagtttttattattttatttttctgtaaattattggggtacaggtggtatttggttacatgagtaagttcttttttttgatatttctgagattttttttttattctactttaagttttagggtacatgtgcacaacgtgcaggtttgttacgtatgtatacatgtgccatgttggtgtgctgcacccattaactcgtcatttagcattaggtatatctcctaatgctatccctcccccctccccccaccccacaacaggccccggtgtgtgatgttccccttcctgtgtccatgtgttctcattgttcaattcccacctatgagcgagaacatgcggtgtttggttttttgtccttgcgatagtttgctgagaaaaccacgaggtaccatctcacgccagttagaatggcgatcattaaaaatcaggaaacaacaggtgctggtgaggatgtggagaaacaggaacacttttacactgttggtgggactgtaaactagttcaaccattgtggaagtcagtgtggcgattcctcaggcatctagaactagaattaccatttgacccagccatcccattactgggtatatacccaaaggattataaatcatgctgctgtaaagacacatgcacatgtatgtttattgcggcactattcacaatagcaaagacttggaaccaacccaaatgtccgacaatgatagactggattaagaaaatgtggcacatatacaccatggaatactgtgcagccataaaaaaggatgagttcacgtcctttgtagggacatggatgaagctggaaaccatcattctcagcaaactattgcaatgagtaagttctttagtggtaatttgtgagatcctggtgcacccatcacacgagtagtatacactgcaccatatatgttatcttttgtccctcggcaccccttttctaccccccaagtctccaaagcccattgtatcattcttatgcctttgcatcctcatagcttagctcccacgtatcagtgagaacatatgctgtttggttttccattcctgagttacttcacttacaatgatagtctccaatcgcatccaggtcattgcaaatgctgttaattcattcctttttatggctgagtagtattcatatatatatatatagacacacgtacatacatatgtatatataccgcagtttctttatctacttgtcgattgatgggcatttgggttgatacttgcacacacatgtttatagcagcataattcacaattgcaagtgatattctcaggaagcatgatgtaagtgacagagacttactttgtagactgcactcattcacttgttctctgaatgtgctctaggcagcctgagtttctactatgtcagtgttacatagatgagaaaccccatgggtggtttccacagaggctgcaatactatttttgataccaaaaatctgtttggttttgtgagccccagatgcccatatggaaaactgaagtgttgatacctctttgtagccctctgatgaactgcatggttcaccttcctcagcagtttgagcggggtggggagagcgcctgcttcctagccatccgattggcctgaatcatcaaaaatgctatcatgaaacaggttctgtttatctgctccagattacacccatcatgttctagagtgctggtttcatgcttgaatctagatcaagcctgctttcctcccctgcctgtactccctgtggctacctacagtcctgctgctgacagataatctaaaccaatagcacctaattagcctatttgctcatgtgttttttccatcgtggtataatgtcctccttgtcaatttagggtgaaaatgtagcaacacgttgctgatggtttaatttctggaatgcaggtaatgaatgtgtttttgcttatccaagtcttcccatcagatgtcaaatatagaagaacagtgttcagaggtcctaaatttaaattggagtgagaaattcacagcgcccctgaactcaggcaaaatgcactctgacaagtcaaccagatattcacagatggtctggaggatttgaagcctaatttggtgaaataaaattaaatgagtgaaattgtatgcagtcattaatctatcaccatacttaaaatgcttcattgaaatttcttttactgcttcaaatgaaaaaagatcaaactatgttatagaaaagcattcaaaacccttacataacatagataaaacttggttggagacttacagaactttctctgctgcttcgagaaagttacagtgcccacaaatctattgctattagaatattttattgtattcaacactcaattctaccataattatgtatatgagaaaaatatttttacctataaaataattattattaccttttaaaaatctgacattcttccttttttctaaagaaacatatttagatttagcttttattttatttttgtgttgatacatagagattgtacatatttctaagattctagtgatattttgatacaagcgtataatgtgtaatgatcaaatcagggtaattgggatatccaccatctgaaacacttatcatttcttcttttcaatgccatcataccaaaaggaagtaaatagaatttcaaatataaggacagccatgattttacatacatgcctacgattccaccacaaaccataattacgtcccccaaacttttaacatttcagatactttgtcccaggtatttcatgataaggattgggctatgactctgttacagaagggccaaatgactaaaatgtctctgaacaatattgattgcaaatattctacccagttgtcaggtcaatatgttccaattcggaatttataacattgtatctctactcccaaaccatccaatctcacctacctcacttccatattatggtgggtgatctcagattatatttaagctcatggttacttgtcaagtagatatggagtttagcctaacttttgaaatttatgctgagattacccttctcattatagaattaagtaggcagtttccaagtttagatttagcaggcagtttttttcaaatcacttaaaagttatatttttttagggcattgaacaggtttgaaatcctaccaagatgtcatgtacacatagaccaatagaacagaatagagaacacataaataaaactgcacagctacagccaactgttcgtcgacaaagtcaacaaaaaaataagcattgggaaatggattaaagatttaaatgtaagacttcaagctataagaatcctagaataaaatctgggaaataccattctggacattggcttgggaaagaatttttgactaagtccttaaaagcaattgcaaaaaaaaaaaaaaaaaaaaaatgacaagcaaggacttactaaaataaagagcttctgcatggcaaaataaatgatcaacagagtaaacagacaaacaccaaatgggagaaaacttttgcaagttatgcatctgacggtggtgtaatatccagaatctatgaggaacctaaacaattgaacaaacaaaaatcataaaacatcatttaaaaaatgggcaaaagacatgaacagacatttctcaaaagaagatatacacgcagccaataaacatgaaaaatgcgtcacatcactcatcatcagagaaatgcaaatcaaaaccgcaaggagataccatctcacacccgtcagactggctttgttaaaaagtcaaaagacacccaatgctggcaaggccgcagagacaaggggatgcttatacactgttgttgggaatgttaattagttcagccactgtagaaagcagtttggacatttctcaaagaacttaaaatagaactatcatttgacccatcaatcccattactgagtagatatccaaaagaaaacaaatggttctaccaaaaagacacatgcactcacatgtttgtcacagcactatgcacaatagcaaagtaatgggatcaacataggtgtccgtcaacgttggattggataaagtaaatgttgtacacatacaccataaaatactatacagccacgaaaagaagaaaatcatatcctttgcagcaacatagatgcagctagaggccattatcctaagcaaattaacataagaacagaaaaccaaatactatatgtactcagttatgagttggagctaaatgttaggtacttatagaattgaagatggcaacagtagaaactagggactaatagaaggggaaaggaaagggggagacaagggttgaaaagctgcctattgtgtactatgcttactacctggttaatgggatcatttgtatcccaaacctcagcatcacgccatatatccaggtaacaaacctgaacatgtaccctctggatcttaaaagttgaaaaaaaaagatgtcatataaatattcgtggtcactaaaagtatctaatgtattatacataaaaataaaaattgggtgaattggaagtgtattctttgtatcaagtcatgtcggagatcctattctgctttgatcacagtgtgaattcttttgcatttttgttaccagtcacttctttatttattgaactaataattacatattctgataatctgtcagaaagataaaaacattctttgtccatgtgtctgaaaatttttaacctatttttctaatgttttaagtgagaagagcatgttaatactgaaattgtaagcagtagactgaaaaatcatcccaatccatgggttatatattgaattgcttttaactgtattactaaatattaagcttaatttattttatttctacatatccccatttccactataggtgatttgtatgaatttaggaacttccttctctcatccatttttatattaaaactcagactttctaaaacaatatttctatccatccatcgttggtaactatgtactgacatgttttgtgcatccgaaaaatgttagcattagtttgtgcgcacagaagtaattccagtcaccatatgatgagctgatttatttatttcgtaagtgtgttcattattattatctcttcagcacccaaatatataggggacttaatgatacctacaagtaaaaacggaagacaaaaacgccctgctctctacagaggttaaaatgtttttgcaacagggctctagatctcagctgtgaaagtagggacgagatgaggctaggcatgcagtgtcagtataatacaatataatcaacatgtcagcatctaatgcaggtgttgcaaaacaaaatgtacacatgggtagtcaggtaacagaaaagcatgaagtagtaagggctatctatgcaagaggttccaagctgactatatactgaaatatttaaacactatgtggggcaaataaaatggacattagaacagttcgatggtcagttggggacttctgctctttcttccagtctctgaacatatcttaaagccacaatcatctatttttatttattgttatacatttatttataagccagcacccctgtgatttaagttctgttgaaatgctgagttggaaaagatcgatggatgggggaaatttagtgcagaggttttgccccaggttcaaaatcctttataaaatattaatacatggaacaaatattgaacaattaaaccactgataagttaatcaatctgattcaaagtacacctgtgaagagggacatggcaagaaaaatattacagtaagaactagaaacattccttcatggctgcttgatatggatatgtcatgtttaagaaaattcttctttagactgttgagattttttttcctgacaaagaagattcactgtcgaggaaagaaagaggtactgtgaaatttgttattgaaaacatgcacatacttttgtcagaatgagttaaagagtgaacaaaatgtgcctattacttacgtgttgtgctgttttaattcaagattaaaatatttaacgtccacagacaagaccacttttatatgaatattatttttctgctttattgctcaattttattaccatttcaaaacacccgtgttgctttctatggccaaagatgtttagcacttttcatggttatacttctgtacagtccaaaatacaacacttactttacacatacacaaacatccaatgtattttgttttctgtcaagtaaagacaatgtctgtgttattaagttaaatgtcactttcaaatacaggatatgttgatattagaatgttcaactttatttcctcatttaagcaaattacagtgtgaagaatgtaactgcagcaatttataaaaatcatatcacattcaattatgagagcaaacttgttttgtagacttgaactagtttcaattaatcttggagttatcatttcaaaaattctaaacagagagaaatacggagtgtaataatggtaggtctttgggtaagctgcttccaggaaaagaaagcaattatatatgttcacatagcactgacaaggagaaacaaaactttggacggcaaagaacttgcattagtctttttgacatgttcctgtggtgtgatttattacgtagacaatcagctcaacttctcaagtttgatatccttggaatcatttgaaatttaaattttaatgaaaattcattaattccaaggccaaaagaagtgattctaattgcttttgagaatcagactatgaaagaattctttggcaaacttgcactgtcttttctcttttatcattggttgcttcgtaggtacttaattgaaggtcctctgattatcagcacgggctgacatcagttcactccatgcattttaaacagtaggccagatgtttaaaggatcagctgaagcatcgatagcatgctagggtgaataataaaattttcattatctacaagaagcaaataaaaagcataagcattttcccccattatcctgaaggagaagatgaatgcctaagcaacattttaagaatgggttgagtgtggcctgtgggaaaatttgggtagaaaacttgtagttagctaatgtatatactgtttgcctctttagctcaccatatacccacacacatgggcatgcatgcatacagacagacacatacaatacacacaacaaacaggaaattcagatatactgaagaaatgtatttaagggattactaagtttttgtaaataaaatcctttaagatgctgagaaacaatggaagagaagtaggacatgatggctcatactttcgtaatttacttgtttaacgtttgccaaggtttaaattaatgtagatgtttttgtggctaggattaatgatctaacagtttggaataattaggcacttttatcacctagaaagcccagaaacccagcatgcaaaaattctggtatgtctgcattttacacttagatataacagagaaatgacaagtagtcaagtggatagagaaacgaatgattcttcacacatgcacacacacatagaaattgtctttttaatagtattttaatgtaacacatttatgcataatttctccatagtgtttatcttatagtgaatatgtgatgaatagtctctaacattagtggttttatagattaaacataattaaggctttatatattaaagagtcaattggtgacattctaatataaacatgtttatctcatatacattgaaatattagataattcattcgttgagaataaatcgaatgagtcaaaacttttaacctccactttgagctttgtaatagtatccactgaaaatattcatgaaaatttttaagtcatttctatttatatattcagtccaaacatctcacaagtttaaaatgtaaactcaagaatataatttctgtattctacaattggaagcatccatcatatcagatgaacttatatagtttgtgaaattttgcaaactttctgtttagtaaatcttaatgtcaaacattttaacttccaggttgtctttcttttcagttttaatatccgcgatctttgtatactcgttgaatggattctcaataagtaacccacaaatatatatacatactatgtacctacaaaaaataataaaaagtaaagaaatcgacacttatccatacctgtcccatagtaataaactattcataagtatatttgaaagatatgagaatcataaaagttcgtgtttgcacccttttgtgcgtggaatcctaggtttgcattttgtggatctagactttttggagtgtggaaataaatgaaacaaataatcgagacccagtcttatattcaggttatcattttactacataaagcataaataacatttgcagtttgtttctatggctagctctaaagtcttagcaacgagaacattatagaaagacttcaactgtagcttccagcagaacttctgaggttccgtttatggactaagcagcagttgagggggacaaaactcataggcaattgatcactccaaaggatagattgtcttttctaacctaatcaaaagatttatagtgaaggcatattcagattttgttgaaggatatggatatataatcatgtgtgtgtgtgtgtgtgtgtgtgtgttagacatacttaaaacattatttgagtagaaaattctgcacaaatggaaaagtataacatgtgttatatccacacatgttgagcatttacctggctgaaacatcaaaagctgaattgacttaattgaatgttgaatacttaatagttactttgtagtgactcactattaaaacattatctcaagctttgtcagaattaatttttttaaaaaactcagattagtgtcaggtttactgaaacagcagatctgaaattactgtgtttttttttcctttcaataatcagtttctaatccaaaattgaatatcagttccaactctacattcagtttctgttttacttgtttggactggcttttggttctgttttccacatagatcctctctgtgtaagacaaagccatttgtgcagattaaattttactgagcgtgttaacctatttaaaacattcatccaaaaagactagtatgaattcttcatatggcaagctgcttgttttaaaacttccatttattctaaaatcctttttacttatactttttaagaaacgtattcccgatatacaaaagtaacacatgctcattaaaacaaattaaaaatagtattgtataaagagctgatacatttctgccttgccccatttaactttcttaagtgttcatgtgaatcatccattcacatcaagacatttatctgtattcatatgaacgtgttttaatatatataacatatatagaattttatataaactttccttttaaaatagaaatgaaattatatgatatatttattctgtgtctagctcttgtcacgtaattattcaagaacatatttctaggttaatatctgtattcttaggtagcattcactaactcctcatctacttgttttcttccattctaattgtgtttaacatttcttcatacaattggttgtcatttggtcttctttcatggagggtgcataatgttcattctcaccaattctttacactttacataactgcttgatacgaagccagaccttataaatatcaacaaagcaggaacactgtaatcagctatcagtttcagttgagctgaatgaccctgaatatgtgtacacatattttccaggagattttaaaactgacacctcagatttctaagacctggagaaatcagcatgagaaacattgatctatattattccgtgaaatgatttcactaaatagtgaagcatctcccacatgtggactctgtaatttattagaataaagagttcatgtgcttctgaagaacttgaactactcttctggcctccgtacattggtttcttagctataggaaggctgagcatgtttttcctatgcgtttcctttctagctcatcattttagtgacaaaacaatctttcgtggtgttgctctagctatagaattgtttcagattcatttgaccaaaggtggcaaatacaacagtcccaacaaaaacaaaagacctattacagaatgatggaaatgaccccagggaacaatggcacctccacatttcttaattccaaggttataagcagtggtgtggacaattctcaattccaatgctgaatcgccttctaatttcaaatacctgtgctaaaaattatttacgtctactgaaataatgaactggaccccaccaggaatggccgatatgcttgtagtcagagcacaactgtagaaagaaaataacattttaatttatagaggtatgatgatagctgtttcatactgttttcagaacgatgaatggcctgctcagtagtttcttgtcatcgtactgagacactttaatttcttaccagctgagatgaggaatacgagcccagtgtgcaggtgaaattggttaacaggagccattaaaatttggaagagtcagaatagcatcaatcaaaatgctttcagtgtaggaagtaaacatgtactagcctgacccacctgtcttttcttttaggtatgttggtaatattacaatcattttgaggtatccataaacaactgcttagatctgaagaattgtatatctttctttactctgccctggcctggggttatggttctcattgagctctaacctttcagaaaaaaaatgtagagaagtggttcaagaagaatgctttatcttgcttcataaaaatgatagtgatagttttattgaaggcttactatgtgccaggccaaagtgcgttttattatcgttcccattttccaggcaaagaagctggagcacagagaggctaagtgagttgtccaggatggctcagctaacatgctgcagttgggatttgcacccagaccaacttcttttcaaccactgtcccatcctgtgtcttctctactcaaaaagtgtttcagctccaaacctgaaactttaaagaaaaggaaatccttagtggaaagactaggttttagtcacaaattatctccttccttacattatttgtctctttttcaaatactccaagctttgattaaaactgtctatcactaggaacattgtagaattgctaaggtggaattgttaaaagaactcaattccaattaactttgccattgattactgtgtgttctggaggggtgttctttctttcaggttaatgatgctttattgtatatctcaaagattaaaaataacaatgaaggaagtagcaaaccggaacttctctcacaatgcatctttcaatctcgtgctttaaatgaagataaaatcatggctgtggtaaggttgcaggaaggatgatatagattaagtttcttgcaaactgccctctgaattttcaatagctgtagaaggtattggttttccaaaaaattgacaaattgaggattcattcagcagtttttttctaggtctcttaccagaaagtgatcactaaaaagtgtagggaaaccactcaaagttggatagatcattattttcacttaagcattttaatttcttgaaggagctttataatgcaacaaagaatttacagtcctgtgtcaccgcttaaattttctagggtcatcagtaaactcagtggaaataaattagttcatgaatataattgacccttaaattctgtcactgtgcaagtaatcggtgggtctgctggatatggctttcgagcagacaggtcaacttcttcaaacagagaagaagcatagcataaattgaagacaaataacaaactacttgtttcctccttctttggcatcaccctatggatggagtatgcatttataatttaacacaatcaagagatctttattatcctacttttgggtacaactgcttcgtttctcttttgaatctctacagctatttaaaaatctgttttgtaaaattctttaaaaaactaaaacatcagattcatatttcaggtatcttactatcttataccaacttaagcatccagtattatcacccacccttcccctgagtgaatccttagcactgggctcttcctgttttatccctgtgcatgctgagctctttctggccttcaagtctacttccgttgcaactgttgtctgaatggtctctctatgtccttcttactctctaaatatttcggaatttaaagcctggaataatctaccttagtccaaaagatatgctacactattctagttcacaatgatctcacactgccgttgatacacaacatttaatatcaacttaatatctatttcagttcattacgaggtcacttatgctacatcttatattgttgccttggacttttattatctcttcatatatgtgtttatggtgctcccaccctcacgagaagttgcaaataccatgttagctgtctgatggctttctatgttgtcaggtataccatttcccaaccagttggcattcaatgattaagttcattaacaaagaattgtatgtgttgaaaaagatgtttttttcttaatgaagcacttgtttttatttttttaatgaaatccaccctcttaataaattttaagtgcacaatacagtattgttaaatataagcaaaatgttgcatagcagatctttataatttttttaaccctacatgcctgatagtctatacccattgcacagcatctcaccatttcttccctcctccagcccttagcaaccaccattgtactttctgtttctataattttgactactttagatacctcatgtaagtggatgcgtgcagtatttgtccttttacgacttgcttattttatttagcaaaatggctacaagattcatccacattgtagcatatggtaagatttcctttttgtggcagaatgatattccattgtatgtatataacatagctttatacattcccctgtcaatagacatttagtttgttcacacctcttggctactgtaaaaatgctacaataaacatgggaatgcagatatctcttcaagatcctaaattgaattcgtttagataaatatccagatgcgggattgctagatcttatggtagttatattttttatttttttgaggaaactccatattgttttccacaaaagctgcacaattttatatttccaccagcagtctacatctccaattttcctacaccttcaccaacacatgtaatgatcttgggctttttttttttttttttttaataatggttatcctaatccgtgaggtagtatatcattgtggatttgatttgcatttccctggtagttagtgatgttgaacatcttttcatataactgttggtcattttaatgtcttctttggagaaatatctattcaattcctttgttcactttaaaaattgggttgttcgaatttttgttgttgttgttattacgttcctcatgtattttagatattgacaccttatcagatatatggtttgcaaaccttttctctcattctataggttgcttttaattctgttgattgtttcccttgctttgtagaagctttttagtttgatatatttctgcttatctagttttgtttttgttggctgtccttttagcgtcatatccaaaaaaaattattgtgaagaccaatgtcaggaaatttttcccttatgttttcttctatgagtttcatagtttcagatcttatttttaagtctttactccatttcattttgagttgatttttatgtatagtttaagttaaaggtccaattccattctttgcaatgtgtatatccagttttcccagcaccattggttgaagaggatatcctttcccagttgtgtattcttggcacccctattgaaggtgatgctaggtttatttctgggatctctattctgttccattggtctatatgtctgcctttatgacactatcgtgcgctcttgactgaggtagctttggtaattcattttgaaactagcaagtgtgatgcctccagtttattcttcttcctcaagactgttttggctatttggagtcgtttgtggtttcatatgaattttaggaaatttaccttatttctgtaaaaaatgcgattgggattatgataggaattacactgtatctgtagatggtttggatatatagacttttaaatgacacatcagatgtatttccatttatttttgtcatcttcaatttctttcaacaatatttcatagctttcagcacacacatcttttaccttcttggttgggtatttactaagttatttattctttttattgctattgtaaatgagattgttttctaaatttcctgtttttatgttgctagcgtatagaaacgcaactgttgaatgatgactttgtatcctgcaactttgctgaatttgtttattggttctaaccatgtctctgtgtggcgtcactcttaagattttctacgtatcagatcatctaatttgcaaacagatataattttacatcttcctttccaaatttgatgtattttatttctctttcttatctaattgttctggctagtacttctggtacgattttgaaaagaagtggcaaaagtgtgcattcttgtcttgtttctgatcttaagggaaaagattttcagtcttttgccattaaatgtgatattcactgtgggtttttcatatacggtttttattatgttgcggtaatttcgttctattcctagtttgttgtgtgtttttatcatgaaagtgttgaaacttgttaagcgctttttctgcagctattgagatgaccatagatttttagcctttgttctgttaatgttgtgtatcacactgattagttttcataaattgaaccatttttgcattccaagaataaatcctatatggctctcgtgtataatcctttcaatatactgttgagttcagtttgctagtattttaatgagttattttgcttctatatttatcagcggtattgttctgtacttttctcctagtgtcttttattgactttgatatcaggatactgatgccccttgtagaatgagcttggaagtgttctcttctctttaatttttctgaagaatttgagaaggattggtgttaattcttctttaactgttcattagatttcaccagtgatgacatttggtcctgggcttttctttgttggaaggttttggactactgattcaatctccttactagtttcggcctactcagattttctatttcttcaagattcaatattggtagattgcatgtttcaaggaatttgttcatttttttctaggttaacatacagttgtttacagcagtgtcttataatcatttgcattctttttggataccagttgtaatgtctcctctttcatttctgattttacttatttgaattttcctttttttttttttttttttacttaatctacctaaagatttgtcaattttattgatttgtttttaaaaaaactcttagctttgttgatttttctattgttttctatttcaattttggcttttttctgatctaatcttaatatttccttccctctgctaactttgggcttagtttgtccttctttttctaagtctttgaggaagaaaatggcaaggacatgactttctttagcagttggaaggacaatgctgtaaatactcaaaaattaattatttttatagtgacaaaaacaaaataaaaaacacttcaaagcaaatgaaagtttatcatttaatttatcaaatcactaagcagactgcttgatcagagagaagatactcatatgatcacataaaactgaaagattaagaggtaaggacattcatgttatcattacatctaactttcttatttccaagatggagaaactgagggttggagaaaaagaaagatttctttgttagatacaaacagacaggactaaactcagtatagcagcctcctaaattccaaagtatcatgatactgtgattttatgcattcttcagaaaaatagtagagccactggattctggcaaagaagttatataaaatgtcaagttcttcctttgcctcagaaatgaagttttatgttccaaaattgattgggaagttctccttatacctcacatcacgtctactattttacattgtttacttttgaagaatttttttaattgacaaataataattgtacatattcatggagaacctagtgatgtttttatatatgtaatgtatagtgatcagatcagggtaattagcatatccattatctcaaacattggtcatttatttgtgttgggaacattcaacgttctccttctagccatttgaaacttctatattattgctaactatagtcaccattcagtcgtatagagcactagaacttatttctcctatctagctataatttatttttaaatatgctttttgaatctgttactataaattgaatgtcacatcgttttgaaaatattcttaatttatgctcaacaggcaagattacacacctgtgataatatctttaatttaaaacattactctgtttaatttaccagaatatggaaccctagtcattttagaggtggagcaaatttcagtgataatctagtgcaaatttctcatcttatgaatgaggagattgagtctgatataagggacgagattttcgtcaatgagcagcttgttaacattagctctgtgatagaacacaggcacttgtcctcccaggccggtgtttcttctactctatgatgggctgttttgttgtagtttttaaacagcagcattttcaccatgcatagttttcttccaaagttcgttcttaacgtttttgcacagaataactagattttggaagtagaaaaaggaaattctctttgcatccttgtatctctggttattttctttgtcctttgatctctctctcctcccctcccctcccctcccctccccttcccttccctcccctctccttcccttcccttcccttccctcccctctctcacacattagagaaagagttaaggtattaaagaatacataatactattaaatttccttcacatagagaaaggaatgaaaaaaagtgaaaaatggtcctcaccaaatgtccaaacttctgtaggtcatttccatagtatcagcaatgtcctgtatggtgcctcggggatatgtaagcaaatgagcaagtggttagctaattctagctttggcaaacacttgttatggcttacttgaggagaagtcacttctccaaagtgaaaataatgtgcacaggtcaattagaatttttttgtagaaaaggaaaatactttgtagggacatggatgaatctggaaaccatcgttctcagcaaactattgcaaggacaaaaaaccaaacaccgcatgttctcactcataggtgggaattgaacaatgagaacacatggacacaggaaggggaacatcacacaccggggcctgttgtggggtggggggagggtggagggatagcattaggagatatacttaatgctaaatgaccagttaatgggtgcaggacaccaacatggcacatgtatacatatgtaacaaacctgcacgttgtgcacatgtaccctaaaacttaaagtataataaaaaaaaaaaagaagaaaatacctccttatgctcctgacttattttctttttggttcctcagtcctcttctctctctctctctctctctctctctctctctctctctctctctctcacacacacacacacacataccccacatatacaatatgattaaggatatatgtgaataatgaaagcttcttgtgtatagatttagaagtctaatggacaaaatcaatattttcctatgtgcatttaattcccccctttgatttaggtatatagtctttttttaaaaaagagaaaaaaaattaggtgaccttaaggtatagatcctactttcaaaaggtttacagaactagggagaggaacatggacaagatttaaagaactattttaagcagaataaaatgtgatttatgaacaaagcatatattatttgtgcgtatgtgtgtgtgccaacaaagatgcaattaggagattgcacagggagatgtcattagaaccaaccttaacgggtgagaagtctttgaagacatttagaacatggaagatctctgacagagggaacaaaggcatagtgacaaaagtcaagggcatatttaggactggagagtggtatgtgtggcttgagagtgggcgagaaaaaacaacaatgcctctgtaataggaaagtagacagaggcatgacattaagagctttgccagctgtgctaaaagtagtgaacaagagctaacaaagtgaagaaatgtaccttttctgatgtgtatcattcccttattcatatacttcttgagggggaaattcattctgtgttgatctagtaaactactacaggaccaaatgataaaaagaagtataggaaagaatgtttcagcatactttacgagataacttccttgtagctattctccatagtattttgagcatcacaaagcaatgagctgaaactgtctaagccaaaattgacttgtcatctgttagggatgcttagatgagaattctacatttgagagcttcttagattcattgaccactatgtcccattctaagatccatgaatgcgtgacctaactattacaccttcttttagtctgattgtcaattttgtattttcaattgtgcaagtttctaaaactattttaggaagataaatctagcagtggtgtgggaatagacaagagagaaggggaaagactcttcaggaaactaaactcacaatttatgagtattctttattgcccaagtcttcccaaagtctttcatcaagaaagaggcattgcaactctccttttatagtttgtttttattctggagcagtgatgttttggtggagttgttcctcagtgcgtaattaaagggcctatgacaattacagttcatctcctgctgctcaaggtactgcagatatttggatctactactctcattcatttccaattaatgtcagctttagatttccttcagtatgctatgttataaaatttgattatcgttgtgcccaccttcccacttaatttcaagcaggtttctcgattacctgactaaactaatgaaatctgactaacccaatatctgtggacagtagtgtgatgttactgatttttgtatgattagtcaagtcatattcatgccacgttttcatatagtaccataaaggatattcttctcgtggtccttttcttttattctgaacatacaatgagaagaccggtaaagtgggctaggaaattaaagaaaaatacaaatggcaaaaaatatgggtcactcgaagtctagaatagagagcacaatcaattttgaattaaggggtgataaggtgatttggtcaggtgactggtgaaacaggaaagaaactatactttttgaagtgtttcatccatgtgttaagattcatttggggtcaagaatctaaatttcatatccctgggagtggaaactaagtaaaaaaaaaaattatggaccttggtttaatagctagaggagcaagagtgtatctttatgtgacttaacttctatgtgaaaagtgaaccttaagattaattattgggggaatttacttactcaggttctatgcctagatggtctgcccaactaagaaaacttattttcctgttactccatcctatttttcatacttttatactgcacttgcagaaaagcatatatttctacccaatacgaaaattcctgggaacatatttttctacatttcccaaattacttcaaaaagtaaacttaggttatttcatgatctccattacaatggacaggtggccttattgaatgttgtcctgtgaatacaaagatccagagtttaaagaacaaggtgtacttgcatctcccacttagggtttgcttgtggtggagagagaatctagtttgcttaaaaggatgacagtgcagtgccccaaaatatctgatatcattaaaagtctcatatttgtctttcgtaacttctctagggctgtcgatgacaggagacccttaactcctatgccttgattatgtgaataagcacatgaaaatattttagttatcttagttcacttttaaactaagtttcaattatcactagattctaaatatcatcattgagccgttcttaaggaactgattttctacatattcattcacttcacctatatctagtgtgtctactatttgccaagaaaaatttactctcttaattcagcattccatatacttaacatcataaaaagtaggccatttttagttttctaaattatttatttaaacatttctttaaaattacattctatcattacactatatttcaacactacagtaagcagcctattttgtgatttttccttatataaaatacataattgaaattaaaaatgaagttaccaagagccattttcactctggggaatgcacatttataaattatggggttattttttcttcatcagctttcatattattaaactttgtctcttcataattacagagatgactagacacagaagggaatttaacatttggtgtgcatttgtctaacctatactttatgttagaaaatacatttccatttgaaaaaaaatcagtaattgtgggtgtgatcaagagggcagcctgaaagtcgggtgatgtgactcacacctgtaatcccagcatttttggaggccaaggtgggattatcgattgagcccaggagttcaaaaccagcctgggcaacacagtgagagcctgtctctattagggggaaaaaaaaaaaaagaggaagttagcctgaggcaatgtaaatgaaatacatatttcaaggatatttatacatgattcacgttattcatataaagatgtgccagagaagactataggtacgttattttacactattttgctaggattttaagaaattcaatgtgtttttatttcagttaacttagaaaacttacctaacttatacttctcatggacacaaaagtttttaaagataggatcaaaaagcccacatggtgaagcattttgaactggatgaaaaacatctattatctttaaaattttatgatattactgattgtaatagactccctttttaagaaatcattccttatagaacataaggtttacatttacaatcaacaatttctatccttactacaataaaggcacatataaaaagtacagttgcatatttagcaggtttaattgtacattttaatgtagaaatcaattcaattctttcatttatcagcattattacagtgatttcaaattaagcataggtaactttgatatagataaatgatgtacacagcagttaaattttattttcaattatgtagtaattgtataacctaggcagtataatttgtaaactttgtattttattattatgcttctcccacttggcataagcacaacacttcctaaaagcataattttctatagacttaataactccctaaaaacctgttttggacccctatactatttgatataggcagaaaaaaaacataatccatgctcaaatttgaaaaatgactggtcacatttggtataatactaaaggtaaataaaatcaagagtctatgaacatttccggacctgcacatttgttttattaaaatgcataattgtctttagtgtgtttctatttgtttatactctactgattttaattaaaaataccaaaatacgtttattaaaaaactgtcagaatctaagttgttaaatatacttaactaggaaagtaactgtttaaacgagataatttatagagaaatgtggtgtattgccaattagatgtcaagatacaatacaactgataatgaaaaagtagcattttcttagggatggaatacagtgtaaggaacaccccagtaagaatacaaaaattactgaaaaaaaatcttccttcctgaaaaaccaagtgcccttcaagtgcagaacctcatccaactaattgttaggtatcactaaagcctgataccttcaattttctggatcattcaagctgtatttttgagtccttatactagaggaggtaaagagctataaaaacacttaatggtatctgatgtgaactgtggatcactttgacccatcacttctacgtctacatcttggataaattcccattgttgtcatagattgtacaggtttaatggtgcgtttgtggagggggctcgcttatagaaaatggagactctgaagggataaggaataaatgtatcacttcaggtcttttatttgaaattggggtccagagagcctttttgtatcagacttgtcaaaccatttccatttagtaattatatatgcactagcacttattcctacttacctcacctctttatgcccatttccttgtagttgcggttatgcatgaataatttattgcaccccttaccaacaatggaataaaacttccattctgaaagctttccatactcatttccaatagcaatagggtttttttaacggacgtattacaaatgtacgagtcagttgaacatagtattcctctttgtaagaactccaagtggatgcatgctgttgtctcaaatctcaattagaccttgctttgaggtcccttcattgccagtcatctgttctccttcccctgacttgagtatttctccagatatagataatacattttcccaactctgtgttccaagaactgacagtggctttcattcattttgtttgtttgtttgtttcttctcgttctcaagtatcccgcagtctactgtttcttccctccattcgtttgtcctttcagagtttcaaaatccagcataggtacttcttctaaaatgtcttacccttcacatacacacaccacttgagaccccatcagcctctgtccacacagtttggttacattcatagactatttttatacatcaaaatatttgaaaattttagggtaaatctcagtagtcattcatttttgctcttattcaaccaatactagtcaatcagcctgtgccaggttttgttgcaggtaccaggtatccatccataaagaaaacaacgtccctttgttgtggaatttacattttagcaggggaggcaaagaacccaataaatatgataaaatatcagattaaaagtacgatgaaaaaaatcatcagggtaaaggaaaaagggaagcagtattttagcaagagtggtgaagagaggaggctgagagtgtgacatctgagcagagacctaaatcaagtcaaggaatgaaacatgctactatctaaagaaatgagtcaggataaggaactagtaagagccgaggcccagagatgtgaatatgctgttccaggaacagcaaagagactggttgatatgatgtgaaaaatgagaagaaaccttatgatatgtgtcaagagaaaaaaaaaatttaaaagcatgcttgggaacggaggcctccagatgaaaaaaaaaaacacagttcaaatccttgttcatgcatttagtttgctttgcaatcttgggcaaaatgttaaatttctgtacgttttatcttcctcatttttaaaataggcacaaggacatctacttaataggttcattgtgaggagtaaatgagatgatatatctaggatgcctggcattatatcatacacttaataatacactgaataaataatagttatgtctatttatttccttatcgtttttattattatttcaatgcacagacctgttcataagataatgataaatattagtggcagaaactgaagatgttataaattattaggaggcgggaccactcagttcaatgtatctgttttaatatagtcagcaaaagtgtgaagataccaacaattaaatttcaatgcattcttccatttcactagttttataaactgatgaactaccagaatgtcaatgtatgaattgcatactcattcttaacaaacagatttgcaaaattatgtgtaaaattagccctcagccttccaatttgttattgtcatatttcatggaaatacataatctgtaaatttttgttttaatgatatgtgaaactgcctaaagtagagtcttggcaactacttcacatttgtcctccagagatagtggataaaagtgtcaataaatgaacactctatattcactaatcacaggcaagggacaaggaacagagtggtcacaaaataccacaaaattaaagcacattccaaattaaatatatatgtttttattacagataatgtttgctagactctttctaattatctgcaaagattttaggaatgttttaatgttttaatatttacacacctgtgtatttcaagttcagtcaaacactattgttaaaactaaatcttctcatctctaataataagatgtgaacttatcttggaaggtggttattaggatgggagagataatgtatttcattcaaagtaaaaatatttctctgtttctatctttctctttctctgtcatctatttatcatctatatccaggtatctatgcacctatgtagactagcattcaatgaaccatagatattattagtagtagaattgttactaatattaaaataagaagtatttaagaagaaacatgtcctaaagcataaggtcaattattactctcatgttttttggcatatgaagcctaaaaagtgtcaatttcaagagagtattaataaagattgtgataactgaaaggttcctgcttgaaattttgtgtggtcttacaaatatataaactctaagcatttcagtgagccaattactgactaggcactatgtcttatgactcttttgtcatagtatgtaaaaaacaaagagtagagacatcataaaaattatagtagatgggcactagggaattacgcaaaataatttgtagatttaatgtgaaaccaaaacatctgttcaagtcaatttcccacaggtcatgtggcaaagagtatgagttccagactgaggagaggaaaaggttgttcttccacagggaaataaactgagtgtaataaacataatttttcttcttaagcattatttaaaacaaaaaaaatgccattaaatctatctttcctgcctctcttatcaatgctcccttccctttcaccacttgtttcaaactccaagccttgggattttattttggctttttgccttaatgtaactaaaatgagagcatcacaaatatgaagctcatcaaataatttagcagcattttcccctgtttttaactttctctttggaaacgtagatttcgaaatttaagggcccaaaatatgaaatgcaattataataggccatttgttcattcagcttgataaacttgaataaatagtattgaacttttaatgcaaaaagaacaaaacaaaatagaactctccacgaagaaacttttcaatgtttgcatttctgtgtgaggagaagggtaatgaatgtgggaaccttaatggaatccatgttcttccagtgatgacaagggtcaaaatggagaaaaatggtcactttctacccagtacattatattagttctatgtggacaactataacatagctgatgctggttttcaggccataaatgtaggtatgtattttcctactatttataaggcaaaatttctatttgtttaatgatttctatataggtagattattctgtctttaggattaaaaacgacctgtagaccaagagactttctaatgtccaccttagagtatatggcttttactgttacagtttccatttcctttgcttgcccctttgagagaaggaaaggagacatttgggatacatacatcaatgaggagctattaatgaataaatgaatgaaattgtcagtcaatttatccacatgatcatcaattgccaataattttatcacctctgtgggattaagtagaggtaacagtttagaaatttgattttttgaaagcatttaaaatgttcaaatatatcactctggtaactaagggaaagtgtattattttcttatgcttagtcttattttggttttgcctttttaatttaaattgaacacttatatcaaagagcttgcaggattataatttgaatttttgaagcaaagatcattttcttaacatcaaacaaagagtagatacaataggaataaaatcggcagaaaaacaagagtatcaaggacagacggggagggtgggtctgtgttagcatgtattgctatgaagaaatagccgagactgggtaatgtatttttaaaaagagctttaatcgattcatgattctgcaggttgtacaggaagcaggacaccagcatctactcagcttctggggaggcctccgggagcttttactcatagtggaagatgaaacaggagtaagcatgtcacatggccagagcagaagccagggggaggttgccacacatttaaaaaaaaaaaaaacaaaacagatcgctcaagaactcagctgctatcatgaggacagcatcaagctgtgagggatccacctccgtgactcaaacatctcacaccaggccccaagtccaacacttggcattatatttcaacaagaaaaaaagtttaattggctgatggttctgcaggctgtacaggaagtgtggcacaggcatttgcttggctcctggggaggcctcagggagtttttgctcatggcagaaggtgatgcccacacactttaaaaaaaaaccagatctcatgaaaactcactcactacactgaggacaatacaaaaccatgagggatctgtccccatgacccaaaaacctcccgccaggccccaccaccaacattgggaattatatttccacttgagatttgagtggcggcaaatatccaaactatatcagggctcatgtccagttatatgtcaacatgcctgcattcgaaacatcctgtccaaatcactgccttgtcataatacttatatttttctttattgaatacgaacacaagaagattaaataatagcatttctactttaaaacagtgggcaccatattaacattggaataatagtagtaataacgatagtaataacaatgatataggctgggtgcggaggctcacgcctgtaatcccagcactttgggaggccaaggcgggcggatcatgatgtcaggagatcgagaccatcctggctaacacagtgaaaccccgtctctactaaaaatacaaaaaaattagctgggcatggtggcaggcacctgtagtctcagctacttgggaggctgaggcaggagaatggcgtgaacctgggatgcagagcttgcagtgagccgagatcgtgccactgcactccaacctgggcgacagagcgagacttcatctcaaaaaaaaaattaaataaataaataaataaataataacgataaaaggatatgtgtaggttttttttttaataggctgttaacattaataggcattgtgatttcagggatatcatcaaacatcctggtcctaagacatcccctattgaataggaagggcttaagttaaacttctcatgagccacaattttctgattatatgtttggtgtgtgtaatagccacctcagtgatgatttgattagcctggacccttacataatcattgaagtatacccatgttcctttatatacttctttagtgttgaaagctcaaaattaagcaaaatagtccccttgataatgtttagattcttaacatttgctttctaaagctggcaaatactctcttcccagtgtcatgaagttaaataacatgttgcttagtgaggactttaatgttgccatgccataggaagaccttattcgaaatccccttacctgggagaatgtcagattattaccccccaacttgtttaacacttttaggattttaaaggtgttcacatttgtattagaacaaaatactattgagaaacatttctagaaaaaaattatctttccaaattaaaatcagtggtatgtaatgtaggagtctgattataatgattaaaatacatgggctttgggcatactgcctaggtgaaactcctggtttattgcatcactattagtataacctatgggagttaacctacgtaagcctcagttaatttttctctcaaattgatctaataatcgtctctcataggcttgttttgatagatatttcagtgtatataatatacttaggacagtgcctgatatcagtaagtctccttatatgctatttttctttctattttaattatttatgcaagagaaactattatgctttaactcaattaaaataaaatgcctttgtatttattcatgtcaaaggaaatatgcaagtattgcattcacttcctaggtgcctttttgaattgagctttgcatggttagtttgtataaaaggttcagtgaactttctcataatgattttttattgaacatatggaatccattaagtgttagcaaaagtcactatccactgagctgtgtccaggggctgacagttatgtctatctcttgcaaaaataaacacatacataaatgcactaagacgtatattacctgtcgtcatctcttagagcatttccatttttcttttaagttttttctttcaatgggttttttatctttgtgagtacatggtaggtgtatatgtcaacggggtacatgaggaaggtgtatatattgatggggtacaagagaggttttaacacaagcattcaatatgaaatagtcacatcatggagaatgggttatctatcccttcaagcatttgtgctttgtattacaaacattctaattatactctgttagttattttaaaatgtaccattaagttattactgactatagcaaccctattgtgctatgaaacagtagatcttattcttatttttctaacatcttagaacatttccacaaacactacctgcttgttaaatatacctattctaatcttcatataatcaattacttttttcctctagaatgtactatgacacatccatggggaaaatgtagtaatctaattaagactatttcctctcattttatatttaaaagaatgtgctctatcaatttatttacttgtacagccgtaggcaacctctaaaatatttaaagttcttaaaagtcagatatttcagttaatattgtgattatatagttgattttgatgaacatgttcatctaccagaaataaattatacacacacattgatatggttaggctttctgtccccactcaaatctcattttgaattataatccccgtgtgtcaagggagagaccaggtggaggcaattggatcttgagggtggttttgcccatgctgttctcctgatagtgaatcatgagatcagatggttttataaagggctcttcccccttccctcctcactcattctccttcttgccaccttgtaaaggaggtgccttgctttctactatgccctttctactatgcccttcaccttctactatgattgtaagtttcctgaggtctccccagccatgctgaactatgagtcaattaaatccctttcctttataaattacccagtctcaggcagttctttattgcacatatatgtgtgtgtatgtgtatgtgtgtgtgtgtgtatatgtatgtatatatgtatacatatgtgtgtatatgtatgtatatatgtatgtatatatgtatacatatgtgtgtatatgtatgtatatatgtatacatatgtgtgtgtgtatatatgtgtacatatatatatatatatatatatatatatatatatatatatgaacagagagagagagagagagggaggaagggagagagggagggaagcatggagaaagagagagtaatagcctaaatagaaataaaactagctccaagtacaggttcgtcaacactctcctatcatacccccaccaaagttaatgttaaccacttggagccctgttcttccttagttgtggagtactttagcaaaattttaaatctaattatgcctaattcaacgacagtgctaatttgaaagtgttagaaactgaagacctataataataatgagagttacaaaacataaatagtgagacaatgatgaatgtagtggatgcatgtacgagggctatcatttgacagtagagatgatgctcaaggacagacaatgagtctttcaatgtgtggagaatgtgctgctgttacagtgatgtacaggaaagaaacaaaaactgaggaagtatcagtaaacaaaacactcaaacatatgagtatacagctagaataaaagcaacagtactagatgacaataagcccaatgttaactcagaaagcagaaggtttttaagaatttggggaatactgtggctgatgatacttatgtctcaagccacagatgccatatgggctctgcgcccagttgaatcggcaccacctggcagtaagtgggcaggtccacgactgccaggacatcccttccaacacttgtggagatcaccaggaaggggggagagacctgccttgacagattttcaatgtgggcgaaacaggtctattttgagaaaagatgttcaatagaacatatgtcagcaaggaagaagagatgatgcttagttctaaagctccaaagagctggcttacactccaacttggggaaaatgcatccgggaaatgcaagattaatctcatcttagccattcttttgaatggatggacatgacccctttctacttgaagacagaaaacataaccatattgatttcaggttttcttcattggtttccatttaggattgttcctccccatcttctttctgtgtaggcatcccagttcccaagtgttcatgaagcacgtatggccttcaggggatgtgtctgtatacattgttatcttatggatgcacggttttgtctgcaccttggttctgaatgtctttactcttgagcatctgcccatgggtccccttctcaaggcctcaatttcttgagtttaacactgcatggcccatgcagcttttcagttaagcatctcttgctatgaccaactcttttcctcagtcaactcccacactcttttcagggacaggaaaaatgtagccacttgctggctgcactctgaggcctcaagaaatttagtgaatctgcctttgcccttcttgctgatgaaatactgccacatcaggccccctcttcggaaacctacaagcatctaattttcttgcttcctccccaactttctttttgactcccccccatccagagagttcttatgtctactgtactaggaaaaactcattcttaaggtatggttttcaaatcattctctggtctggactttagctacggttttaaatgaagaaacaacccagagccaaaatataatgaaactatttccttcttccacagagtggaaactgctttggggttaaagggccagtgaaccaaatagaaaaggatctcagggaacacagattgaagagagagaagaaaaaatatgaaggcattgttggttctcttttgagtttaaaatctagtggggattgtaagcacacacacatatacacacacacgcttacacacacacaccagtgaagttatgaaggattttgtcactccaacgaccttgaatttgattatctaggtcagttgttaccaaagtggaatgtacatgcccaataatatgcgtgctaaacagttggggtagtgagaaaaaatactttttatttatcttgttctctagaaattaatattttgattgtatattttatagtgtatgtgatgtgtaagttgtgtctacaaaactagtgtcaatgtaatttaaaattacatatgtctgtgaatatatatttatatagggtacatgcttaaaatgtgtttacttctgaggtacatgaacatttttcccccaggcacagaaagacaaataccacatgatgtcacttaaatgtgcaatgtaagaaaagttgaattcatagagatgtagagtagaatcatggttaacagaggcttgggaggtggagtgagggaatagagagttactgttcaaagattacaaagtttcaactagacagagggaatacattttgagatctatttcaggaacattttgagaccctcactctaagtaataggaaatcattactttagttaacatatttgaatatgagttgtgatgttctatatcgtttatttggattctactaacccacacctagatttttatggcattacctttttactcactgtgaatatcctactcatagacagatgccctgggaacttggacttgaggcacccaagaactgagacagtgagatttgggggcacaaggatctatggataagttcatcttagtgatgataaaatcaatttggcatgtttcacggacagtgtgcattttagaaagggtaaagacttggaaacgggatatttttgagcccaagtgtttccaataaatagctgtataatttgaagcaaataattgattttttgttctctttgtgccctcgcctgtaaaatgggagaaatgtattcctttctcatccttctcatgaggccattgagagtatctaatgagatcagactgtgacatagcataataattctcatttcttgaaggcctattatacactttgcaagcactgtatgtgttgtttctacttctcttgttcgtttttcctggaataaatatccccccctcctttacattggattgccattattcaccctgtaaggaaggcttcatggttctcattttcatctgagaaaacttaggctcagagaagatcagtaacttatctaaaacacacacatacacacacagacatatctatgcccattattcttaacctagtttctctattcaggagttatctctgctgtctctgcttctgattataatctgtgtaagctgatccaagtgacacgattacagggaaattgtaagccctttgagagcagagactacctattgatatctacattttaaaatttgattttagccaacctgtttatatgcaatgactaacaggttagtttgacttgcaataaatattccaaatcctagactaagtaaatttattaatgtaatgatttaacttgattttttcattggcatgtttccctgaagtcgtcatgcaaaattgaaaaaaaaaaaagtatagtgtgtgattctagattgaaattcaggaatcctccagggttaccttgtttgctttccaaatagttcagattgcttagtctgaccaacaaggtccctgacacttggaactctgtctatccctctaattgactttgtccctgatgacctcgcccagagatactcttcaccccagctatactgtgttgctagagtttctctgatatcccatgctattgtttcctttgttctcttcataaggtaccatttcccacccgccaactcctgttttcctgatggacttttgtttcaccttacaagatcattgctaatgtatttattttgagaataaaaagtgtaggaaaggtcacgggacaaagctgtacaccagacctttcccagacgaacctagtgtataatctccctagtccaacatcatggcttaaggcagtcgatagatccgtcttaatgtcccttttgagttttctactattattatatgaggatttatttttgtctgaattcctccctagatttgccctagagagcaatgactatttacagtttattcctctttgtatctcttatgttaaggccagaccttggcacatattctagctgattagaagacgtttgttgaatgaccaagtgattgaacaaatgaccatgtgctctgccacagtccggtcagttctactttggtttggttatgtgtttgccacattaaagttgtagcctgggaagttcagttgtgagatgtctgcagaacatgaaaaattggaataatgaggttatttctaaaattgctataatttaaaataaatagtggtttattccatatatgaatatacactggaaacaaagaatttctagaatactggagattcaatgataacatcattgaaattaaataaataataggattatgctagttactttctaatttactagaaattgaccgtgtgcatggcacgtataatgagtatcatgggatagttacaaaaagtggtgcttagtgagtttctgtggaaaatctcggtaccaataaaacggaggatttccagaaatcgatattcctcaaagcttgacagtatttatgcacggttacactttgtgtgtctttcgtttgaatcaatggaaggaggctataactgaaaattattgttttagtgtattatatctttaataataagagttttaagaatctatcattagaaataattattcctcaatttgtaattctcaacatttgaacaaataaatgctctgtgtctatcagttaatcttgcccatgaagatttaataaagcacgctagtttttacaaatgtgattttagagatggtcattacttggtaaaatattttgtgttaacacttccatgaatatgttctgtgggaatatactgcctccacattgcttgctcatgaagacatgatttttcacatcatcctatcagtattttgagaaagagattgatcccatattctatgagcatttgaacattctctagtatttttgtttaatcattaaaacaacccttgaagtctatgtgctacactggttatttccctcttgactttcctttacagataaccctctatcataaacaacctatctatatttgttgtctccacatcatgttgccagccctgctttaacacactgcacattgacttctagcagcaaaggctcatgggaggtactctcatcaaggacactgatggtcctcatgttgctaaatttggtgggtcctctacagtctttatcctagttcaccttattatggaccactgtcaactctgttctgcttaaaacactctgttccttgcttatatgactctacactcttaactcctttgtgaattcctcatctgcccttccattaagtattgacgacatccttcatagttttgatctaggacctcttttcctcttacttgacattatgtgggtaatcttgtctttgaacgcaattaccattcttatgttgatgacccttaagctataattccagcccaaatcatttttctgaggaagctacaagaatacacaaatgtctaatagatctctatttagatgtccctcaggtgcttcaagcttaaaatactcacctgagctcatcacctcatctataaattctgcttctcctccctggctccctgatttatttaatatgaccaccatccacttagttgaataaagcagaagcctggacaccatctatacctccaattaatcactaagttttgttgttaaatacgttcttacattttctctctagaatgtcttattttccccatctttacacccaaaaccaaaagtcagatgaccctgatctcctgcttagatttcaaaacactatctcttgcctagactctggaatttcagtcttgctcctctccaatctatttctacaccctagactctggaatttcagtcttgctcctctccaatctatttctacacaaaagctagagtaattttttaaaaaacaaaaatctgaatgtgttcattttctgcctaaaagccttcagtaattcttatttgttcttccagggatagagtaacaactttcagacctagtttattagctagttctttaaccacaaaggactctctcacttgtctactccccctaacacacttcgccctaacctttgccattcctccctttcccttttccttcccagatggacttaagtcctttcagattcttaaatgtttcttcctccagtctcttacatctcttttccttgtaactctaaaaactacttagcttacgcaaggaaaaaggtctgtacaattcccggaatcagcgatcctaacgttccctgttgtttttttcgttgggacatgaattcattcacagtggctctaaacatcaccacccctgcctatctctcccattcctactttatctgagcttatccatactcttgaagacttacatattttttttctaccaggaaatcattactagccttattatcccactgtccaaaccaataagtctgattaggtatctgtatatatttaatattactatatgtgtttttctaacactctagtagaggagaaggtgtatttctttctgttttttagaagcctgtatttctgctattatagctcttaaggaactctcatgcaattgcctactagaatgtaagttacggtaggataagaactggatcagtcatatcacacatccacatataggacctagcaccatatctaacacacagcaggtactcaatacatttctttcccaaataactaaagagtttaaacaaaccaaaatgattaaatgagaagtaactgttttggtaattcttgtgtccttactagagtctaaattgagtgatttttatatcatcagtttatactcccctttcccaaccccaattctttcttttttaaattttttaaatcaaatatgccttaaaacttcaggatcagttgagtaaaatgatgcttttgtcgtcttttgcaaaataattgtatttcagaattttgatttagatattataaacacacctaaaataatagctttagtcttaagatgaagtgcttcttaaactccctaagatgggttggactatggatatgaacatggacaatatcacattaatttgtgtacacagttctaacacagggtctggcatataagaacaagtcagtaaatagttgttgaatggaattgaaaatttaagtagcaaataaagtattttgacctacaaagcaagaaatcacatttttctttttgtcacagttccttaggaagataattaattttttagtatttaaggatgttaaatatttattttatgttctatttactaggcttctttttatgaaaattaattggtgaaaatagcgtacatatcttcctttaccagaacatttacattttgggcagtaacgctggcttttgttaaaaaagcaaaatatgtgtgaaatttatgtttgagttgatttcaatgcattacatttccattttaaatcttctttgaaatactctatttttgacaccatgaaactgtattagatcttagtatgttagcaatgttttgcagttttagagccataattattttaatgaccactttcagcatatacgttttctacaggaaaaataatctcaagaacatgaaaagtgaaatctatattttgggtttcaaaatgatacattttagctaaaatatcatagttttaatttctcagtgaaaaatatagtgtggtaatttatgaagagactcagtgtttaaaaattatgactctatagtcaagtttatgtttataggacataggttattcaattacatttaaaataattaatttagaaaatgtgatcaatgtaacaaattttacctgttcttttctaaagctaaatttgttgtttgaagtgtttcttctaaaatgctaatgaactatcaatttaattgttgagcttagagttagaaacttaattatattgccagaaataaagaaacaaatggatcccaaaagattcacacattagaaatgtatgccagggaaatgcttttgaatgtgttcaagtcatggcttctaactcgtaacttataacttgtgttatgtctggcttcattcccttaagaaaaaggaataataatgccttcggagagcatcccagctgtaagagctatgcattggtgtctaaaaaagcttctcactcctcataccatcctggtctgggaatttaaaaaattgtcatcttttgataatctgtatcacatagtcttctgcatagtcatatgaggttagaactgccccataacttttgcagggcctatagtaagtgtgcaaatggttgcctgcatgccacatatttaatatttataaggtataaagtcaacagactattaaatatatcctatctgctttccttgacaattatacaatcataatgatatggacatctagattcgatttagaattctctctctctcattttctttttcttctttctttctttctctttctttctttccttcctttctttctttctttcttctttctttctttctttctttctttctttctttctttctttctttctttctgtctgtctgtctgtcttgtttttttaaatagtgcaagcagtttattccctggcaaggaatttggaaaaaactcaaatagcaaaccacttgatacaataaaataaattccttagagttttgtactggaatgaggcagcttggttagagctaaccctaagcctgttatttaggatacattggcttttcttaagcttaaaaaaaattttactgtgttaatgacatttaacatgagatctatcatcttaataaatactacatgcacaatacattattattgactctaggtagaatgttggacagcagatctctagagctaattcatcctacttaactgaaatgtaatgtctgttgattagtaacttcctatttcgccctatccccagcccctggcaaccaccagtccagtctttgattttatgagtttgactgttttagataccttatttcaagtaagtggaatcatgcagtatttgtctgtgtctgtcttgtttcacttagcgtaatcttaaggtccatccatattgtttcatattgcagaatttccttttataaaggctgaatagtattccattgtgtatatataccacatttatctattcatctgccaatgggcatttaggttgtttctgcatcttagctattgtgaatctgttgccttttttccctacctcctttactccatcctgcactgtgaggaactctgtgcacatagatctggtcgccccatttcccacccacatgttcaagtttttcccactcacctcatgcaaagatttaccccttagccatacccagtaactgactttgaaacatttgcccagggagttgagggattctgaatgccagatcatgggagcggggcttctagtgagcatgttggcttggtcctacagactcctaatcagagctttgcctttgaaagcatggggcccaagggcaaggaccctacttgttaaggtctaaattttttttctgaaataaccacatcgagcttttatgtgtagatggcctaaattgggctaacccagaggcagtgacactcaagtagtttacatctaagcgctttccatgtgcttcttttcccatttctgttacttcttacaaaataaaaaatcagcatctcaattaccctgatttgatcattgagcaatctaaaaagtatcaaaatatcacatgtagcccccatatacatacaactgttatatatcactataaataaatatatacacattatatttaaaaatcaatactttaattttacatgtttaacaaatcactagcatatacattccagattgaacttacgagggatgtggaaaagattcagtgactaaataacaataaagtactctaaaaatgaaaatgtgaaatggagacagtataaatctaaaatcatatcacttatgaagtattgtttcaaataaacaataaaatatatcttcaatcaatttaattttattttagttgtataaaatctttcggtcagcattaacctaattggaacactaaataggtacatctaaaaaatataatcccccccaaaaatatgtagctcataagagataatgcattgaacacagataatattggcgttaaaaacagaactctaccacatttgcaacgaaatgtttatctgttcttcctactagaaaataataaaatagttctgcatgagcttgaactcgaagtattaggtgtacaaagaccttttagtgaatgaatgctagctgaaaagcaaattttaaatatgaaaaattagcaagacaaacatttgaatttgtgggagatgagtaaaactcctataaaaatgaattgtttagtgttaaacagattgtgtatgaaatattaatggcatattgtcctgagctccccttccgctgtttccatgtagatgactgaatttcaaacagaaatatgccaggaatgattacgtgaatgaatattactacatgagattgcttaaagagtatttcttcttttgccttctttttactttcgttatttcatttagtagttagaaaatactgtctacaaatatgtgagaactgcttaatttatttttgagacattaattaattcaactaaactatattgactgtgtgagagagattcccttggtgaatatgtggatttttgcggtggtaagaactctcctctggagcgcaaatggtattgctctaggaataaagcatatacctcaggcccagatgaaccagtgcaatctacagtaacaggttcaaagatgacctcatgacctactgtggactaataaaaatcaaggagacctactgcaaaggtttctgggaaattctttttctcttgcgttgaactaagtaatatacatatgtgatagttagagctgcagcctttgtaataccatgacagaagataacctgaaataaggctgacagacacaagagggagacctaagagtactgagagatatggagcaggaccccctgattgaacttcacttgcagcccccttctgcagttttcaatgacgtgaaccagtagaatccctttgtttactgtttttgattaatttgagtgcagctttatgttatgagcaactaatagcatcctcactgtcacaactgccctctatacggcaggcactttgtgatactaaagaaagcagtatacagagtagagcccagtgaataacagggcagatgttgcaattaaactgcctgtttaaattctagctcttccactagctaacttgtgactatctaagtaatttaaccttcctataatcatacctatcttgaagacttgttgtaagatttaaagcacaacagtgctactataaaacaggtatacagtaaagcttagctacttttttattaggccatatgatatcatttcattaaaatcttatagccatgctataaggtattatgatcctcaatttataaataagacagctcaagttttggtcaagtgactttaccaaggtcatagagctagaaaataatgattccaagttacaagccaaacctcttcaatgccaaatttacatcatcccccattacttgaagtgtaagattcacatggacagaaatttttgactgtttgatcactgctatctccttatcatctaaaacagtctctggtccatattaggtgttcaataaatatttgtagagtacataatttccttcacagactccacaatctggtgaaggaggcagacatgtaagagaattatttcaggattccacagttgatgctgtaacagagctaaatataatgaatggaggaggaatgaataagtttgtctgggagcaatgctatggctattgaaataagtcttgctcatgctttgattgaaatggtggatatagatcacacaacaaataacaattagataacagcttgttgggagaaagcgaggatcagtgtttgccataaacatttctcatagctaatgtcaggtgtttgatttctcaacattttatatctttgactttgattttctctgtttttattttttaactccattctcaagaagtctgcacataagagtttcaacatctagcacttcataactccgtcatctcctctcaggcttagagcaaattctgagacgtggatttatcgtcgagtgatttcttcctggcattttatctctgagaccaggatctggttgctaagcatgtagacatagaaatgcatttcttcattgaaccccataggttcaaactagtggataatgagcacaatgtcaatgtgattatttgtaatgggggaaaggttaccggagaatattacacgaccatccacatagactaacattttcctcatgactaagtttacttagcaaaacaaattaaaaacagaagtttgtttagcagcacagaattgaaggaagacaaccagatggttatgaggaagattcatccaaactatgccagaactgaaagaaattaagttcattcagtacaagaattgtctagaataagagaatccattttgtgtcagcacttcccaagttcttgttaatgctaccttaagttcaattcaaaccaggcagcatttattacgtgttgtgctgggtcctaggaggaccgcgttttaagaacttactgtgatcttctagatcaagtttttatttcaatatttctacctcatttctgattcttaggtgttccttatttcccaatttatcccctgcagaaattgaggcaataagatgtctatcttattgcctatggtgttgattatttatgttatattctgttttgtgaagtttgacctctacctaattaaattacattttcaattgtatcttggattgatttattcaataagtattctttaatatttttgcatgaggtcggtcaggtttcatcagacattaggaattaattataaaaatctctagattggtacttggagcttaaaggaataaggtggtggaacgttaaatgaggaggaaagaaccagcagagctgggataaaattcatctctatcatcttcccacctgcttgatctctggcatataatttactatccgtgaacctcaggtttctcttcagaaaagctgcagggttgttgggggaaataaggcaattcctgggcttcagtatgttcaaaacagagcattaatattattatagacttttgatgatttacacaattttagctttttggcaagacatatttactagtactaagtaaaagcacgttgactttctaaaatgaaaatgtgtatgtgaggatgaagaaaaagaaagtgttttgtttgataatatagcattataacactgcacaaaaaaaaaatggtatatgcagagacttccatcacttgcttatgatgccgcattgggatctcattaataagacacttcctcagacacttcctttgtgttcaataaatttcaatttcctcctttccttcagttcacttcaagaaggacggcagcaactttcttgttgccaaacctgacaaatgttttttagtgctgattatactcgagcattctgtagcaaaatgctgtgggtgaaaatgccttccttcttaagggaatttagcttctgtagtaccagaatctccttgttgaatgaacatgtactgcctaagtcttagtaatccctcctttttgagcccattttctggcatctctccctttaatattcctcaaaaagttggatttttcctggacttttcatattacagactttcctttggtcatcctcatccattccgtgattccaactacattttccctccatcctggcatcttctttcttccagacttgtatatgcaactgcttccattcatacacttgaccaaccttttaatttctataagatcaaaaactcagctcacaagctttcccctaccatcgagcggggttcttcttttgcttctttgtttcagacaatggcaccaccatactcgagtaaggcacgttcatttatcaggtcctaccaaatctacaataaactctcttgaatttatccacttgttttcatttgaacagtcatttctttacctgggtagcctgcaccttctacctgcattgattcagcagtctcttcaccactggctctccctccctctcctgcctctcttcttgctccttcaatttattctctactcttcatagtgacttttattaatgcaaatatgaccttataactcccttgcttaaagacccactcatgtttgtctttgtatccataacttccggcctagggcttaacgcatagcaggtgctcagtaaatctgtggtagatgaaagaacaagttgtataaatactgaatggtctgatgtgctctttgttgtgtcaagaaggacattttgcagtcaggatagctacatcagtcctttagtaggcatttgacagcactcgcattattcctcaagagaagatggatgtattgattctgtatttcaaatgacataacttttgtgaaataagaggctgccacggtaatctgagggatctctcaagttcaagggactccacagtgctttgtgtaaggtaacaggctaaagggttcagtcttaaactttcttaagactgtagttcagggttcctatggtggggctataaccctgaattacatcctctttcatttcatgctgataatgagaactacaaaccaaggggtattaggaaagaatccaggtttgatgcagggaaaaataaaaacaactgataatctctagtgtccccaacttcaagaattcctttcttctttacaccaagctttttttctctgccaggacttactttgtcttctacatgtttaagggagaaaaatgagttaacagaaggggaggtacagcatttctatttacttagatgctagagaacaggatgaaaggtatgaaaaatatgaaagtctctctctctctctctccccagccttcccccgcttctctctctctctctctctctctgtgtgtgtgtgtgtgtgtgcacgtgcgtgtgtgtgtgtgtcataatactcaacctttcttttctttcaagcatatgttgtggcagagacaagtgtacatcaaaattcgtggtccctctttcatagtatagagttcttgctaggatccagctgcaagccagcaactacatttcccagccccactggcatctagttagagccatgtgactagttgtgaccaattgaatgtgagtgggagttatgttgcaggcataccttttccatcttcttacttcccatttgctaaccttatggaaaagagtcccaaagacctaggagatgaaaaagcctaaaatggaaggactcagagtccctgaattactgggtagagaaaagctgtttgcagatgggaatgcccattttgtagtattctttcttttcttaagccactaaaattgtgggatctctttgttatagctactggcattaacctcttacgtatacatacagctatgtgctacaaagaggaatagatacattttttaatcgttgaaaggggagaaagaaacatatttaggaggaaaataatttagtctctacaattgaaaagtgttttatgaataatattttgttttggcagcatattaaatctcaggcagctgaactacattaattttcaattctctatatatgtttttgtcttcagggtttagtaacactgatatataacagtttctttcttttaatttccaaatttaaatgtctaagtttgccttctaggcagaaattaagtcccattgtggaatgagattggatcaacacttcaccaagatcattttagttctttgtaatcttaaatgaaataagctaataaagcattaaattagcatgttgtaaaacttcgtgaagttttaatatgcttctaagtggcagctcttagcttattatctctaaagctaaagtcaaaataaatgtctcagttgatgaaatggagatgaggcaacattttatcaaatttaacaaaatattttatatctgaattataaagtccagattatctagtaattatcatataaatgtatttaaccagacatgcatttttctctaatcagtagccctggagtctttggaccacaaatgtgccttatctcaaatgctttaactgtgacattttgctttagactagctcgactacttctacagaaattatacacttcattcacattcatccagatgaaaaaaatacatgtagaaatgatcataataagtaacatttgtttaggatttcagagtttacgaagggtttttctattcactttctcacttgttcttcatgtaaactggtttggtggacaactgtcattatccctgttacctggagcccctgggtcttagggagacttcttgacttctcaaggtcatgaaggtgctaactctgaccgtgtttttattcctactgtgccacacttctcaggtaaaaatcatattgcagacactttaagagaagtacttaagaaaataaattcctccagagaattacatttaagttgtttcattaactgcagtgcataaagaaaggaaaagtgttcccaaacccatgtagtattttgctattgcttatggtaatattctgcacacctaatattgtcagcataattttccatgtaacaaaatgtcctaaatcagcaatgtccaatataactttgtgtgatgataaaaatgttctgtctctgtgctgtccaatacaacagccactagatacacatgactactgagcaatggtaatatggccagggacactaaggaactaaatttttatttaatattaaataacgtttaaatttcaaaagccgcatgcggctagtggttgtcatcagatactgcagttatagaaaattagaatttacctctttaaatactaaacctatttttaatagtaggatttttaaattaaaatagttctaagtgcttttaagtgatacgaagtcaaatgcaagatttctgttttaatagtactctcaacccagagacaatcttcatgcatccttatacatgttctttgttgccttattctagttttattttaacattaaatgcctctgttctacttgatattgacttgcttcagagaacaccaagtatagtggaaagaaacacacacatgaggacttgaggctaccaaccaggttcaactaaatgcactctgatttaattgtagtattgggatcccctgttgcatttattgaagaagaaaaaaactttgcaaccaaaaagatatttgaaagcaactgttcttcttggacacatgatccctcataaagtggggcttcctgcttttcagagacttaatttctgttcatattcatttcagcaatagtaataatgatgatggcgatgatgataataatcatgatgatgcctaagtgttgtagtaatgcttcttctgagccagacgttagtcaaattactttctctacattaattcaggcaatcatcacaacaatcccacaggacaggttttattattatacttatttagctagcaaatgatataactaggttaagttacttgcccaaggtcatactgccaagacagtggctctagtgtccctgcttctgaccatatgttatgctgcctatcctagagcttttctcttctaaaatagtaaaataatatattctttgtttgtttcatacttttttttttttttttttttttgagagggagtttcgctctttcgcccaggctggagtgaggtggcgcaatctcagctgactgtaacctctgcccccaccaggttcgagtgattcccctgcctcagcctccgaagtacctgggataataggtgcccaccaccatgcctggctaatttttgtgttttcagtagagacagggcttcaccatgttgaccaggctggtctcgagttcctcagctctggcagtccgcccgccttggcctcccacagtgctgggattacatgcatgagccactacacccggcccatacataaatattttaagcgaagtacacatgcatgatcatcatacttttaataatttcatttaactgtttccaaagaatgttagtatgaggttttctttttttctttttataatttcaacttttattttagattcagcgggtacatgttccctggatatagtgcatgatgatgaggtttgctatatgaatgatcccaccacccaggtagcgagcatggtaaccactagttcttcaacccttgcctgttcccttcctccctccttcctctgtagtccccagtgtctattgttcctgtctttatgtccatgtgcactcaatgtttagctcccacttttaagcgagaacatgcagtactcgttgtctgttcctgcgttaacgtgcttaggatagtggcctccaattgcatccatgttgttgcacaggccatgattttgttagtttttatggctgtgtagtattccatggtgtatacgcgccacattctttatcctgtccaccattaatgggcacctaggttgattgcatgtctttgccattgtgaatagtgctgtgatgttatatgtactttttggtatattcaaagagaaatgctattttcctcttgacatatttatgtcaatttaacatatttatgtcccttttctttttaggagcaccattctcttcctttaacattataaataaaatattttttgcttttctgtttttgtaagtgcagttttattgacagagtgagacatacacgtcgatattgtgactagctgcatgtcttctattatttagaggtctcactcaaatgtagattatcaaattctgttagtgaagagggtagaacagcagaactaatgctggtttccttctctagcattatttgatgataaactaagatgataataccccccaggtcttagatacctgcagtaggacaggcaccctacatttaatgctcctaggaatccttcaaagtgatagcatagttattatacagtaattgagaaaactgatgttcataagttagaaatttttccgaagttgcaaagaaagtgaatggaagaattataccaagttctggccgggcgcagtagctcatgcctgtaatctcagcgcttcaggaggccgaggcgggcggatcatgaggtcaagagattgagaccatcctggccaacatggtgagaccccgtctttactaaaaatagtaaaattagctgggcgtggtggcacgcacctgtaatctcagctactcgggaggctgaggtaggagaatcacttgaacccgggaggcggagtttgcagtgagccgagatcgtgccattgcactccagcctgggcgacaagagcaaaactccgtctcagaagaaaaaaaaaaaaaaaaaaagaggattataccgagttctctttgattccaagcccaaacaaatccttttttgcaatatatgacattgtttccctgtttgcattccccattctgtgtatcacacatcctgtggcctgatcaaaattcattttcagattctgaatttattttccattgaatctatataaactataaagacagaagatatatgtatgtgtgtatacccacgtttctcttccagtgtcaactgataaaaatagatttcaaagtctcaataacctttaattccctttttctcttaaaaattctttagaacttgtacatgacattctgactctagcagattttagaaaacagagaggccattagatattcataccttactattcagatgaagtattcaatgctaaattatgtaatttatctgctttgcaaattgtatggtcagattgagttccacaaaggagagataatttttaatataggcattctgtagcttccctaattattgaattagtttagagcaaaatccttaaattgtatcgttgctatgctcaaattttgtatacttgtccacgtaggctatattaagatttcattgaattttggtttctttctcagtgataattcaatatatcaactcaccactcagatttgcctttgggaaaatccaggccccttttctggatttttagagcagattttaaaaaagtgattctgtatatgtgttgaaattaaccacatctcattgcttttgaatgattgaggtaatgtatacctactactttaaaaaaaatgacttacttagaaggtgtccatagttttataagttccattgaactggtttatattgtatttagaaaggaaaactactccttttatccttaagggtgaaaacctggattttattatacaattaacacatatttattttttattatgaaatatatcacaatataaacgtttacagggagtgtttaaagtggtgttgtccaatggaaatataatgtgagtcaaatacgtagttttcaattttctactagccatattagaaaaagaaacagagaaattaatgtaataggatactttatttagcctagtatatccaaatcacaattatttaaatatgtaatcaatataaaaattactaattatgtatttaacctttttctttagtaagtctctgaaatctagtgtatattttacatttatggcacattgcaatttgcattagtcacatttgaattgttcaatagccacaggtggctaatggctaccgtgttggacagcacaggtttaaagaataatatgaacatctgtgttccaacattctgagtttcaaataagaagaacaccatcagtattttgggagaagctccctatgttaccccttgctaatcaccttccttccccccagagccaaaagtaaccattatcttgaatttctagtaaacaatgctcattttttaaaaaacgtatgttcaacacctgtatttgtatctttaaagagtagctagttttagtttgcctggatttgaactttatattaagggaaccaccccatctctaatcttctctgtgaattcttttctctcaatactatgttttacatatttacgttcatcaatgtgcaactcattgtatgtatataacacaatgtatatattttacatgcgtatggacatttgggttgtttttatgtttttgttcatcacaaaccacaacacacatgtgttcttgtatatgttttatagtgcatgtttaaaaatttctcaacagtattcgctagtagtattgtcaggtcatagggtatgcacacataaatagaaatgattgattagctgcaatttgtagtgcacacatatttgctatgtaagtgatccatgtttaagactttaactgaatttaaaaaatattttattggagccaatctaaatgagctaagggtttgtattgtttacataagcaaagattacacttactgggtcaattcggttgattaactttggatatataaaatatatagctagttgttaaatagatataattattaattggcattacttttgtttgtatataaaaatttcaaaatatccatgacttaagcaaggtaaacacccactgggtggcttaagcaacagaaatgtatttcttgcagttccggaagttgaacgtctaagattaaggtgatgacagggttggtttctggtgagtcctcccccattggcttgcagatagccgccttctccttcatgacctttcctctgtgtatgtgcatcccttgtagctgttcttccttttatgaggacattagacttattggattaaggtcctacccatatgaactcatttaaccttaattacccctttaaaggccctacctccacttgcaggggttaaaacttcaacatatgaatggggttgaggagacctacttcagtccataacagtttctatattctgaagatggtctttaattaactaaacagttaatgttactttactgggaatgtcttttggatgggggaataagctgatgatatgagaagggttggtgaatttctcataagtgtgaaatttgttgggccggcccagcatgattttcaatcaaatacgctttggggacaagtaggttgaatcactacgagaggtttaaaagaaagcaagttgtaattgcaacttttaattgaaagaaagacaggctttgttgatgtgccagcaagactgataactggctttaacgtagatagtaaggcagcagattcaatccactgatcgtgatctactagtgaatttcaaagccttatgcaatagaactacaaaccctttccttgcccaccttgcaggtggatccataggcaaaatgaacatttgcaaaaaagccgctatgtttcagaatttgtgctagggctttaatatctataatttctccaaatcctcacaatttaagaattaattcaacttagccccatgaatagggtgaaaattctgagatttaacaaactaaaataagttatctgaagacagacaaatagaaagagttgagatattctatttgaatgtaaaattttcaaaaagtagaatgacagcgtcaggaattacagtctcagtgttgaacacaagacttaggaacaaatttgctgcatgtaatttcattgagatgggacaaagtacagcatacgtaaggaagttttagaacaaataagataattattttacgagctttgaaacatgtgtaagaaagatacgaataaaagtataatcacatttgactaaaacatgaataccttaaaactgaaaagcactgagattatcattatataattttgaatattttaaaccacaatgctttgggagtgcactgtaatattttagaattggaattttaacttactggcttaaaaagtaatgtactttgttttaaattcaaagattatcttgtaaattcagttcgatctattgaaaaaattataaaattcggcaagaagccaaagaagaacaattatgtagctcaagataattaaattttcatgtttggctttagaaatatattcgtcgtgacatagtacatggtaatctagtgagcccagacaagtagttttctctttttgtcaaagggaacaatttgatgcgtgttcaagttgcttaaataaaattttgtatgtgctttctcatcacaagagaacaatatgatttttgaaattatttttactttataaaagaaaaaaaaaagccctcacagagaaaaaagaaaaaaatgatgatgtctttgaaaaacaaagttaatacagctttacatatatttgacctacatcagggttaatatttttcaaggtgaaacattagatgctggaacttgcaaaaacaggcaatcctcctttagatgaaacggacactctaagggttaattcattcactgagacctattgtgaagtaagccctacagagactgaaaaagttaaatgcaactcacaaaagttgctagaagagtcatgatgttaaaataaaataagtacacaatgtatgctgcaagtatacttagagccatgctaggtgcggttgagaagttcaatacaggtccaagataatagctgcttctcctatagaacatgtcttctcattggagggataagacctgtgtctatgaaacaggcgtaattacatagctctggaactatatatgccgaaataaatgagacagtaagtgttattgtactataaagaatgaagaaatcatgatgagaagtaacagttaatgaatgttttctagaaagagtaggatctgaattggccttaggttgtaagcagagtttatagatagagtagtggtatgtcagagtcactctgggtgcttaaacatacaaatccccaagtctcacccaaatgtgtcttcagatgaaaggaaaaaacaaatgacttgagctcccccgcaaagaacacgggtggtatattgagcagccaaggagtgaccagagtggcaggcccatgttgagggacaaaagaggacaattagaatatgattaatacaaatttacagtgggatgagttgttagcctgaggagcttgaatgtgaacctctgtgcaaaaaggagtcattaaatacttttgaaaaaggtgggatgggaagaaaatgacattctcaagacaattagatcgaacagtattaagcatgctgacttattaagttatgcaccttgagagggtggaatgagggaaaagggtctttatctggagtaagacaggaagaagctaagctgtaattcttactggactgtaaattatgtgcagatatattatctgtcatgttcgtgggcgcattctcagtacatagcacttgaaacaggtactcgataaattgtcaaatggatgcatggagtgatttccatgcaaaatctaatattgtatagtattagaagggggaaaaaagcatggcattatgctagcagaaatgtcatttggtattgaggatgaaacattttcaacagtttgcaaagccatccactcaaacattctgtcactttccaataattttgaaggatgttctttctacttctaccttattacacaatgagttgagtaagataaagaagtcatgtgcaacaaaacagagggagattttctgaaaggcactacaccaggaagttgttgtactcttgcttcatcttgccatcttggatatacttctggcgctacctccaggccagttcctcgttacatatgtcatttacttcccacatgctagactcaccgagttaatcattttgctgcagttaacacattttagcagagtgtaggtttatgggtgagaaggaaatcaatgatgtttcaatacagggttcttttcccatcccccttatttccacttagaactgtctctcaagtcttaatttgcctctaaacttttttcccagcttacattcttttctgaaaaatgcaacgacgatgccaatgtttgttgacctgaaatacattgtaaaacattcataatactttgagcagagcttccaaactcccatttgcctcttttatctcccttaccttggcccctttttgaaggcaatgtgatatttaatccgtttctattgatgcttcaaaattattgaaaaactggtaattgtatttttccctttacttatcagttgctagttgacaatgagtgtttgcccaaacaataaccaatcaaaaggtaaaaaggagattccagacatatctgagaagaaattctttggaagaagcccgtaaatggaatgggaattcaaacaaagccgtttccaaaagaaatactaaatggtctctaaatgcaaaaggattgctccccaagcattttatgggagcataaaaagctcccaacacattttatgacaatacttctactcaatgacttcttgtgttgacatatttgttgcactcgacgttagtatttacagcttcttatcccaaatatttacttaactgaagccctgatgtttttaaaaacttttcatctgtgtttaacagcccattttacagaaacttatttgtttcatcaggcagatatttactgagaacttgcaagtgccatatattctaaaaatgctgatgataaaactgtgaacacaatagattctcatggtgcttatggtcagggctagcacacacacttgtgaaatgatcactgatgatcaaaggcataaacactacatttggaagaaataccgagggatccagaagtatcttggaaacactagcaagtatagcagatggtgggattggtgcttcaaagaacttcttgtggaagatgttacgtatgtaccttctctgtgccaggcactgctaggaagtgctggagagaaaaagatgtgctagataccgcctctgtcctatgtgcttgtgctttgtggggaggtgagtaggataatcccagttctcatgcagtgtaatgagtaccatgacggaaatgcactccaagaactaggcagcatgaccagagataggacatttgagaaagacttcactcgggtggtactatcttagtctgggtgctaaaatagatgtgatagatgagtaagggtgacccggaagcaggagggaaagggaggggctttcagaacaacaagtgcgaggacattaaggtgaaatagagtataatagtattcccagatccttgggattgttctccattaggctaaaacaaaggtgttttctcttctttaagatttcatgactgcagattgcataacagaaggtcatttaatagacctctaaactgaaggaattcttgaattaaatcacaacatatcttccatggccagagaaaccattgcctccttatgtcgacattactaacagcaccagcacctgctgctcaggccagcgggagggttgggtgttgctgcctaggtaatgctcaccaactgatgtcctgccatgagtagttttgccaagttccacaaaaaaaacttagtgttctatcagcatctaatgagaattacagtcattagttaaataaaagaactattagataaggagcagaatgaacaacacacaatccatcagcttggtgaatggtatcagatggtttctgggtgctgggcagctgtgcatccaagtagacagggagaatatatatgtcctttgccttatgtacttgtttctctaatccaaaggcacagcaatccgtggaagctgctatgataaggtgtttagtggtgaaaatgtcttgaaagccagtagattattaaagtgatgtttttaaaaatgcagatggagagtaagtactttttatctagagtagtagttctcaaagggaggtcccgggatcagcagcgttagcatcacttgggaacttagacctgcatgggccccattccagatctcacttgaaaactctagggggtgtagcccggcagtctttgttgtgaccagctctccagggggttctgacactccaaatgttcaagtttcagaacgctactcacaggccatcatgctcggcatcacctgaaagcttgttagaactagaaagtcttggccccaccccaagcctactaaatcagagtttttgggagtagggccaagaaaactgtgggttaacaaggtctccaagtgattcttattcatgtcaaaatttgaaaagcgtcgatcgaactgttggttctcagctttgattgcgtatctgaatcacctggggagacagttgagctattccgggcccagatcacatctagaccaattgaatcagaatctatggaggcaggacccagacatcagtattttaaaatatttcttgaatgatcccagagtgtagctaaggttgagaaacactgttctaggattaaaggattaatgtgtttgagagtatgttaagatcttaggcaaatcacaagggtgttaagaactaccatcttcgcaaaaggagaatgtgcctcagatattctggtactgctttgattttaccttcagtagtcttacctattttgagtatgcttagtagtactaatatgaggcttattactaatatgttaaaatttgtcttttaattaagtgggtctaaacgttttaatctttaatctctgacccaactagaacttttctaaacattttcataatagtctccaccttgtcttctgaccttcacttatgttctttcagggttcttcgtgtgttactagtaatagtaatggcaagtgtttattgaacacttactatgtgaagattctaactggcttttaataatcacatcagctctgggaggtagaaggtagggatcctccttgcttatcaggtgagaaaactgtactatagagaagttagcaacttttcccaggtcataatatgtgacagctaaagggagcataatggttggaataaaataaatctactctagttgtaccgaaggctcatatttgtctcacgtacttgatttggtcgaggcccaaggggtcaatttccaatgcttggattcctggatatgtagagttgtattaaaaatgctaaaaacctattatgtatcatacaatcatacatatcacctaaagtattatggaaatgaatctgtattattaagggaaaaaggcctgtgtgaagaacaactgaaacttcattttaattgaaattaaataacatgcatcatacactaaaagtgcacgttatgaccccatgaattacttcaggtggctttgattcatgttacatacactaacaaatatagaagagtgatataatgcttcttaattaactactaatggaagtttactatttaactgcttcttatgtaagaatgtaaatgttttctgaaatatcagaacttttcattaggaagcacttttaaaaatagcaaaactgatatgcactatgatttccatatacattaaattgaacttgtaaatgatgttataaattatagaaaccaaggggatgttcaaattagatatttgtctaaataaatcatgtatggattgaacaaatactcattgagaaataaatgtattccttttctttcaattatctaggattccttgtttatctcttcagaagcaaaatgtcttctgtccgttttatttccagttaaacattcttcagattatgtaaataagttaacttccaatcctcttatttctgtttatctcaccactcttctaatttagacgtgatcaatatcttatctttttgcatttcatagacatcaggatccagaataattgagtgagctcaaaacaacaatggcaagaatgatgttttcagaaaactcagcaatcattcgtttaataaatattcattgcctaccaactataagcaaagtattggctaggccatgtggggtatacaaaaatgtattaaatatggctcattctccctaagaacttacacctattagacaaagtacatgcataaaaattataatgtataatagaaaataaatacaagccctagaatgcacagttgaagtacgatttgcatttattataaaaagaaagatgaattggctgggcacggtggctcacgcctgtaatcccagcactttgggaggccaaggtgggcagatcacgaggtcaggagttcgagaccatcctggccaacatggtgaaactctatctctactaaatatacaaaaattagccgggtttggtggtatgcacctgtaatcccagctacttagcaggctgaggcaggagaattgtttgaacctgggaggtggaggttgcagtgagccaagatctggccattgcactccagcctgggcaacagcaagattccatctcaaaaaaaaaaaaaggaaagaaaagaaaagattaatttcctgttagctaaatcaaggaaggcttcatggagaaaaaaatatttcaacacacacttgacgtagcagtgggatcaggctgatgttagggaagaatgaatgacattctacactgagaaagagatattcagtatatatatgaagagcagtagagaaactaacaagtggaaatagactcaatttacaatacttgcctgcctggagtactctatacgttgactgtaagttgcagtttactcagaacaatcccactttctacttgtttatcctatgtaatcatttattgggcctccttttgctctcaaaaatatccttgtttggataatagattatcactctgttcctaaatgaactgccctgtgtcctatcccagtaaaagggtgcattcgggcccttcgtaactgcctccactacatggttgattgaaaccagagcttggcattaagaagttagctgaacaatcagatttctattcttggaaaacccaagaatttcagaatagatacagaagctgtatagctttaataacatgacagagttgtagccttgaaagctatgtacaattcagaattatgagggagaagaaattgaagaaacagtagcagccgggtaaatgcagaaacaaatgagggagacacctagggggtgactgaggcacaataatggaagagaagtgcagtgaaattgcttgaactcttactgatgagatttctactgttgccttgaatccaggaccacctatatgttcattctttgtcatgctcagagttatgacagatgctgttattgaattccccagagactcccttatcgtctcacctcaaaccttacaataatcccttctatctttctatccatccaagctggcttaagtaaagtctatgatccatattcctagtaaacagagaagggaaagagactgaaggcaaaggccccaattagtaggctattgcaatatttcagggaaaaggcaatggccatcacattgttgtcccaggaatgagaatagaaatgaaagaagataatgaaagttgaaaggactgggggggcttgacaactgtttagacttgaggagtcagataaaataggaagccaaagataattcagaatattttgattttgattttcatcaccaaataagatagtagtactatgaagaaaaaatggttaaaaaacaataataataaagagaactcctccaaatagtaccaagggagggagtttaatagaggaaattaattccgtaggtgatgagagtcctgagaagccaaacgagaaaagatcaaaacaacccagggattggcagtcgcaggaagctgttctcacttatggctggggctttaagcacaaggtgacatgagatttcagaatttgaagtcgtctggaggcagctaggatcaggtggggcctgtcctgttcggcaggacctgcaaccacaggaggaggatgcgtcaagcagaaagttggaacacaagaggggattcagccataagccacaaaataccttccagagcagagagaaggagaaataccctgaattccgtattttccctgccatttagttccctgctattgccacacattgacgtattccatccagagaagtccattggcatatgagtctgggaaatgtagttcccagggggacatgatcttaagggaaatagacaatgactggtgcaacaactgacctgtgtgaggcaggagggaaaaaacaggaataatatagtttttctctagatcccttcatgcacaaagatgcaaaagaaatgtgttggcttaatgagccattctgggtggccctgtaggtggctgtcctacgaataagatttttagacaaaacagagatgacttcaaatgtcacaagaaaagtatcagacaggaattaatattgacttgatctgtcacaggcgtcaatgatttgcattaagccaacgatcttcattgttaatgtctgggaaattgccagcagcattacgactacttgtgtggattagtgtaacggattcccccactaacattcaggaaatcatgtcaagcacagagtgcctatgtaagagtggttgtgtctattcactacatttcttggactaataacacacttagccttcctgaattgccaacatgtacaaaaccagattggggttttttagttgttcatggaactatcatttattgggtagctcctgtagaagcaagatacagaaactctaattaggaataagacagtccctgtacttcaaagagctctcaggggaggcacacaagtaaacaagcaattattatcatacgttaggataataccgtcatggtgataaccactgagtgatagccaaacacatggaagaggtacccaagtctaacttggggtagtcagagactgctttcaaggatatccgagtaagtgttagctaagacatgatacgtatttctaggagggaaattttcaaggcaaggtggagattgtgcagtgacgcccagagcctggattattttggtgactgctagtatttcagaatgacttcagcaaaagttgtagagaagatagaagacaacaaagtataagcagaggccagataatgaggacctggaacagtggtttgctggtaaatgtttaacaagaggctcttggcggggagagagagtgtctgatttgcagcatttggcaaattttgttgcacaaatgctccagcatagccaatttcaagctaccagtgtgacgtcattgaatgcagaattggaaagaaacgggcagtagcacagcattgtatagttattttcattacccagatataatagataaaatatccagatggtatttaatagatatggatgcaaaatttaaatatatgtacattcatgtgcttcatgttactgaatgcgcacaacattcattatccattcattcacgtgttaatttaacaaacatttctgagcctctgctctgtgccaaacgcagttctagctgctggaattacagcactgaaaaaaaaaatttgtcctcactgaggtaagacaaacattattatgcccattttacagctgagaaattaagacatatgaggattaagcagtatagttaaaatcacacaattggtacatgaaggaatcaaagaggaaatcagctctcagattttaaatccagggactcgtttctgctataccatactacctacctagttgagctggattttatcatggtttccctatttttatcaccatgtggttggataagtaaaataaatatatgtgacctttcaaataaatttgggtcatttttcttggaagctcatctggtgtgaactttaaaatactgcaattaataatgattataataccctggaactctgtagcaacctcttttgaagaactccaaggagcctctaaatgtatcaaactaagttcttcaagtgaattagttatcatctgagagtaatatagacttttaaaaatgcattaattgtattaaccctttcaggcccatagacttaagtgtttctttctccaaataaaaatagtaatctctgtccattttctttagagaataatgaagtaattttcattgaatatgtagtcaacataattacttcaattcaatcgtgaaggattttaaaaattatttatgtctactaacttaaagacatgcatagatttcaagaacttaaaaatgcatattgcctctttgccctatgcctcataaaacaaaattatgataacgttgtgtgttacagaaaaacgcactgattgtaatgaagggtgcttcaaaggccatgaacttggaaagcaacttatttacagagacccccagcaatagcagctaaaagattgactgactccctttattttcagttatccttcagacacttttgacctcttcctgtgcctttctagtcatgtgcaatcttgtggatatctcttccttcctcttgttattttctatttcctctgtttctatttgtttctaaaaataatcatgtttgaatataggattagcttccttcccatctccccattaccaatctctcactataccgctatgttattaatcttcctgagaaatatatcaggttcattacattagttaccagctcaaaacgtatcagtggctttctagtcctcacaggctcaagttaatctgcatattctgactttcatattctgggttcatgcaaacttttcaactttccctcttatacctacttaggaggaccctcaggttccatcatgctcatgtttcaagccagaagttctcctgcctcttcctctatgtagactccacatagactatgatatcctgcttctcttttaatcctccatcttcagctcacagccacactcctctgtgaacagttaaatgattctcccacctcttacctcctatagcacttatttttcatgcagcatttttgagacttaattaaatctacagttttaaaaaatgtttttctaccacagtctcttattcatactaaaactttcaagtctatccattttgcttatacaaccacaccgttaggtcttttaggtccaagaatacaagagaatggcaaagcacgttgtttacatccacacatactgtgtaaattcaggtaattttttttaatcctatgatcctcaattacctcacctgtaaaataggtactactcatactgcagaactcttgttggaattaaataaatgagtgtattaaaaatgctcaacaagatttggcacaaaatcggtactcagtaaatgctaatcattattccctttctcttcaaagctccacaattctgtattcatatcaccctctttatatcatttgcaaaaatgtatcctattccaactctttccacctagcctcaacatttacaaacactcctggtgggaagggaaagcttttgaggagagcacatctatactcatttacttctcagggatgcaagctgccctgcttactgagggcatatgttcatagtcacaccggagcccactgtccccttatactctcaaatgggcagtagcaaatcatcttgatcggtagtaatgacctgtctctaaattttcacatgcatcagataatttcttttttagtaagtgttatcttacatatatgccaaaatatcaccattatatggaacactagctgaaagaaaaattattcagtagtcttaattttctagctaacataaattctctccattttcatcatccatttagattaaagactttactgttagctgaatattcagagactttattctgatttttaaaatttatgaggttcataatgttaagacttcaagggtgagctgtttgtgtcatttataatgcgtgactagacagtaactagaaaatggattgttgactttacaagatttctccccaccacgtccccccaaacctgtgctgctgtgtatttggcctgaaatctttacttctagtcaatctttggacctaaagcctaccagcttttagcatcctttaagattgacgtgtctctgggagaccaatagatgctaaaccaaatttcgtatgcacttggcaatataggataataacaaccatactccctgcaattgtttcctaacacagatgtaacaaattaccacaagctgggtggcttaatagacatttattctctcacaaatctggaagctaggtgtccaaaatcaaggtcaattatccctctgaaggctctggggaagaattcttccttgcctcttccagcttctggtagccccaggtgttccttgatttcaagcagcacaagttcaacatctgctcctgacctcacataaccctcttctttgtgtgtctttctgtgtccactcttttctttattattattattattattattattattattattatactttaagttttagggtacatgtgcacaatgtgcaggttagttacatatgtatgcatgtgccatgctggtgtgctgcacccattagctcatcatttagcattaggtatatctcctaatgctatccctccccccctccccccaccccacaacagtccccagagtgtgatgttcccattcctgtgtccatgtgttctcattgttcaattcccacctgtgagtgagagtatgcagtgtttggttttttgttcttgcgatagtttactgagaatgatgatttccaatttcatccatgtctctacaaagaacatgaactcatcatttttttatggctgcatagtattccatggtgtatatgtgccacattttcttaatccagtctatcattgttggacatttgggttggttccaagtctttgctattgtgaatagtgccgcaaaaggacaccagtctttggatttagagcccaccctaaattcatggtgatgtcattttgaaattcttaactaattacatcttcaaagaccctatttccaaatctggtgacattcaaggtttcagggacatgtgactattcaggggaaactattcatcccaccacatcccccttgaaaattctggaaaatgtagtaataaaggcttctgataaattagtgtggaaagtattcacggttataaattactaaaaagtctcactgtgagctcttaatcaaaaggccctataaaacatttatttgcttgattaaaactacacatccgatattttggttttggatttattattatttttagacttggaataactattttatgtgaaatagattccataactgaagcagcatacctctcaatttcccaacatttattttattattttttgtcttcacactacttaataactgaggaaaaatcatttagaccaaagttcaccttggttgacaccatccagacagctacaggaaataacaatggaaactaaatctctaagaaaaagagtctttcatgtgaaatattgcagagttgattctagatatatagctgttggaagaatggatactattacatagatatggcagagtggtatccagcacctttcaacaaagatctttcagagtcagtcttattatgtctggagaatttacccagggcttaggtgcttttactgacaatctaaccacctgcaccccacccaccgtctaaagctaaagtttattggaagacttaggaaatcagtcttcggaatgtttctgagactggtacacccaccacttcattaaagtgcttcacttcacttcattagacaagaagtaaaatacttgtcaggaaattatttatagtaccatgtatatgggtatcttatttaatactacttaatgatggtactacaagttatataaaatggagaaataagtcatcaagtttgacaataatgatatttgatattatcattatcttttttattcgttcccacagaagtactctgttattggtttagaaaaatgatatttgatataataaagaaggaaaaggtggtaatattctttattttttgtatctttataccccagctctttcaccaatctcccccatctctgtagttctcctctggtgtccccaggcagtgaactattcccagtggttagggaacatctcattgagtaagttacatcaacatttcttcacatttcaggacaacaggaacagtgccaaatcctagcccattgttcaactctcaagccttattatcctaataacacatccatcccaagaaagaattcatcaagatcagagaggaatacgtataattttttatagtacagtatttaaaatgaaacagcttttggcccgcgtggtctcagtgggctcaagggggaaattcaggatgctagctcatctcacaccaagtttaataaagggtgtcctataaaaagctaatttcttgctggtaaattgctttttaagtaatccttgctgttgcaagagacccattcatagcgctgacactgggagccatgttggaaaggctagatatgctctgggagataaggtaagatccaggtggaatcttctctttacagaatgacaatgtatatagctaatattgtcctttgaggctagtttgcatgcagttgctggtatggcactgctcagcagcctgctgcagataagaatgagtgatgatgccctagattttaatggaacttttagagtgcatgcagcagtggggtgcagtcttcagcaaagaaaaacgagctgacttgcaggcatgagagatcatcaagaaagataaagaaataggacatccactctaggttaggcaaggctttttagaggatattatggaaatgagcaagaaccaatttaatttttataatgccactccatttaactttaaaatacaaggtcaaggtactgtgtttttcataatgattaaagatttggagcactctttctgttgaaacatactgcatctgtttggcagaaaaaaaaagtgacaaagaataaaactgggatcagagaacaacaaaaacatattctgtcacttgcctaacacaagttaaaaagcaaaggaaaaagagacaactctgatggacatgttcatccttatcccaacagaaggatttatttacctaaggtcctattatttcaagttactttgatcccaggatggtaacataaaatgtacattttaaaataaaatggaagtataagatcaataaaaaccacatatctgtggataaaacagcagattcaatcttgtggctgaaagtttgctttaacccaacatttggtaaactattcactctgtaatttattaaaagacatactgttattataaaactatctcagtttgcatcttgttggttctgtcaaaatttcatcctgctaattctcaacttgtaatatctctgatatacatgattaatctattttaggaataaaacaaaaactacctttatcttacgcatttctaggaagtgtttttagatgtaaagtaggggtaattgtagtatagtggaaaggattttgaacttgaagccagaacatatgtctctgccaaaaactaggtgtgtgaccttaaataagttacttagcttcctgaatcttagtttgtttagcttttttctataaagtggcacacctatccacatcacagttttgttgtcaaaattaaataaaatactatattagaaagaaacttttagaaagaaatttataaactgaaatgtactatacaagtttaaatcattctcattattttcttaccctaaaattttgaccttatttttcttagcaaatggctgaatctgtaaaatttaacccccacgcagcatctggattcaagagaactacggtcatttctttatacagaatactaattatacacatatagcaaaacacaagttttttccaactactctgtgtttttaaagattcagtgtgggcagaaggaattttatcaactatgttaggggaaaaaagtctgaagaaatgaaaataatgagaaaaagcactgttgatttaagtgcaggaacataaaacttcaaggcaaatgtgaggccaactgagttcatatatatcctcacaaaatgatttagttaatttaaaaacttttctaataagcaacacaggtaatcccaaattctatcttttatagctctaagagtccccataatttattcagcaattatttaccacccacttattataagaaaagccctgggataagtcttgagaagaaactaacaaaaacaaaacttgattgtttgctctcaaaaagctgggtctaaaataggcaaggtaagattttgttttgaggagcccgtattttccagcactgtccattgtaacattaaaatagtttgccaaaatcctcactctgtgggtgtatttgcctagggtgctaaaattgcttaaaaactttgttatttggctaactaaaatcactgaatagtaaacagtagcattagagatggcagagacattaggtgtcatgcagttcaactgcttcacctagcagacaaagacattaagttccatttcttaaatttaactatctggttgaggatacacagtagcagagctaaatcaagaacctcttggggttagagtttttgtttatgcattactttgttttggaattaaaaacagtgcctgtttgctaagttaaattgaaaatatgctctgaaggagaaaaacagctataaaaatagacttaacttccaaactatggatcacaataaactaaagaaataatttctgtagcaataaactccaacactttccataggaccagaaaggcttgagaaagaggagaacaaaaaaatgctttggggcttaccatatatatggagaaagctaaatgaataaaccagttgaaagacagcgagttatactagtaacaatattactgatatcggagctctcacttataaattgtatattatgatcatagtgactaggtactttatatctgctttctcattccttcctcacattaattcacatgtaggacagattacctcttctgtttctatccagaggcctagagctcaggccctcatcgaagacagacagagctatcatccttattctaaaaaaaaactaagaccccagacatagctgtgctacttatagactagaatgtgagagaaaaagacaagctttcatcatgggcttaacaaactgaaacacttcttcaattttgagattgagaaacttagctaatgctaggtgtaaagatgatatgctaccttcataaccttggtgaggagaaattagcatttctctcagtcctagaaggaggatgaccatgaaggtcttcattctcttgagaagataatcaaatgcttcactgccctgttaacggtttactcaatattcaccaagaaaagtagatgggattatttttgcagacacttatacgggtaatttattctgataagcagagacatacctttagtgcataaattgttccctttgtgctctttgtaataaacatcaccatagagaacaaacacgaagtaatgacattgaattaaaagacaccatagaggcaacagcgactggaatttgtgaaagtaaaaggatagtgcaaacagttgtgcgttgcattctgctctgaagattaacaagctgggtcaggctttgaccatcatgatgagcaggagatttttctaatggaaatccccaatcaagttcctgctgcacccagaaaggaacggcttacagaaatcttacatttctttgcacataccaaattgcttggcatattctatcacaaggtttactttccagggaatgtgatcaagaaatcatgatcctaattcctagttaaccctcaaagtttctcagaacagtcagtgcatcactgtcaacttttgtgcaatgtggaaatcagaattggtcacacgtttttccggccactgttttagattcatataatattagtgaaatcatgtcagactggtatagccatgaatttatacttcatgaataggcactcaataaatagtggattaaatcgaccgatttgatttttacctccaataatttcaaaaatatcattgaagacaaggttgttgaagctgtcacttttcttgctgaacctttgttgtgccaggaggaacagatggtaaaatcaaaagtgattagagaatcagtggggtgggggtgagattggaggggagaggtcttcccagtgagacccgctagcgtcttccctgagcagtatgttaacccaagacaattttagaaatctgtgcccctaagttgcttgacatccaaagcacacttgatgcatcctacatttctaaatatttttattgttgtttctcggtagtaatcatctggtttagtcactctaaaagtcaaggatgaaattttaaaatgcaaataaaagtgcctactttctctctttccaattcctttttgttttattgaggtataatttacatgcacaaaaaaatcgcctttttaaagtgtacagtttgatgagttttgacaaacatatgcagtcctacaaccacgtccgtgatcagaataggaaatatttttatcacttcaaaaagtttccttgtactcccgttgcagtcagtctcctgccccaccccagcccctggaaaccactgataggtaaaagcacttttaatctgaaaggtatttaatgtatggcagtgtcagtggtaataataacaagatttattcattggttcactgtatttttgagcacttatatgtgcccgttgtatgcaacccattatgctcaacccctgccctcctcaccagggataaactagtggcagagatagacaaagaagccgtctctctatcacccctatcttatagaacattcttcaatgttagaaatgcagtataatgtggccattgagaacttgaaatgtgcttagtgggaatgaagaactgaagttttaactttatttaatttcaattaatttaaatttatatagccacatgtggctaatgactatcccactggaaagtacagcttctatacaatatgataatatgatacattataacgcaggagtttaaccaagtgctaaagctttactatcaccagggtcactggtgttatgtgaaaagaaaacttacaatagaaaaataaatcctttaaatagtcacagacctgagaaagtttccttctcaagggaacacacattggctcattcaaaggaggttaaaaactagcatttaaggtaatttcatgaagctttcctttggatttctcatgcttattgtatacataaataggcaattttcgatgggacctaataaatcactgttttttatttgaacattttaacaaaattatcaaacagcattgcatttatgttcaacctatttgttctgagaaagacaacgattaagtagaagtcatcaaagttaccagaacaatttttgttcttatgttttagaaggcattgaaggtgtttaaaatgtacacttatagagtcagagtactatgcaactgtggcccttatagtttatccgtcatgcatctaaagccattgttacatctgtttctaattgtgcatggattgtccaagatacacaattggaaattccattttatttatcaatttgaagaggtttcacccatgtggtcactatgatcactatggagtcacattaaattgagaagtctccagaagttgcagtatttatttaaaattctaactttcttcagaggaacaaattctccatttctggattctgaatcctcattagccataaggttgttgtaagaatttgcagctaataggaacacatcctggggagagaccagttgaaaagtaacttggttctgagtgaaattatacagagacagtttctacttcaggtggtgttgctaatgaagctatcatggtaattttagcccatatgatccctaaacgacttcagaaccacttttcatccactaagaacccacttcaaccactgccacgttcactaccacagtataatatggaacaccctctggaattcagtaagtaacttcttaactcattggctatagagctttgcctttgtaaattctttccttttgcagtaaaagagattgtttcaaagtaatccaattagtccctaggcatgtctagaaaggtagagtcaacaacagtaaggtaatagtccttataagatatgtaagaaattatcagtcatttactttaaaataatttgtacacttttccttttatatggttcttctatgttgaagccagtggtcatccagtgattaagattagccaaactcaaaaggctaaaactaaattcaaatggtattattttgctttaattttatgcaatgctatgtatttaaatttcatgaaagtttcgtatggcattgctatcaatttcagtcaggataaatttcccgtgaaataatccacaattttcaactgtacgttgggtacaggtaaggaaacacccttaagagcttatccagttattagctggtattataaatttcaagtaattcaatgttcaattaataaacagttactttaaatgggaaagtatgagtcaagagttagtacaaaggagaatcttaaaagatgaacatcaaagaatcttactattgatttgttggtgcctttgcttgcacttctccaaattgacttgacgttttaaatttgtactgataatcatcagagtcaaatctgcttttaggcaaaaagtatccgctagttattcccctactatgaaagtgatgagatgaattgatcatgtctccagtgtatggatggatgtctttgaggaagacctactgaccttatgtttatcttctgtcagcatggtgtgactatgtggagagacagtgctatttgctaaatactttgtttttcaaataaaaagatttcacagattatgcattgtagaatttataagtattcttttatgtctttgaatgtgccaatacaatttttatgaagttggaactattttatctattttaatgaaattgtaagccttctgtgaattcttttattaattttattctgaagaaaatctgaccaggttagggaaatcaggtcaggttacgacgtgatcccagtggaaaagctgaactgtggactgtgatttaaaatagggaagaggtactgaagtgttgtttttatttttgtttacaaatcagcctttctaactattatgtactcccatccttctatctttttctccaccagaacgtattaacaggcatgcatataattaatgcttttcttgagataatattaaaattaacttcatctgtcaggccgtctgggctaaaagtacacagtcagatctgggtaacatttgagttgatgtaaatatgcccacacatactgacaatgcttaccatttattgtgtgaatgaaaagcagtgtaaatattgtttgttctactagggaagctccacattttaatcaaactttgaccgtatttctaaaatgccagagcatctggaattgttaaaggaactgatagtttttgtgtttttaactgttaggatacttgaaatccaaagggtaaagaaactcagctgatttatacgtttcttcctctttattttaatgtgataaaatgtagtttttgtcatgggctgacaaacagtggtagactacactaactctgcgtttgctgggtttaatcttaccctctcaaggcatggaatgggagctcacttcagacccagccatgcttcactgtccactgccttctcatggatatagtgtgaacattaattagatgaattccataaagtgctttaagctctttggagaaagatactcgctgcataattattcttaactcccatacgctcttatgatataaaccattctgccaggaaatcctttttagggattatcacttaaaatgaaattttcattattaaaagcaggaagaatatacatctactgacagacgaaaatgtgcttaaggcgactgcttttaaataggcagaaatcctgaactatggagccatccatgcctgaaaatactgagtaataatgaaaactggtagcaaatttggaatattaatcatcacattaagttgcaaagaaaaaaaaatacaagccacatgccctttaaaaatacgtgcacaaatctttattctagaaatatataactttaggcctaaaaaagtacaaaaagtaaattattttatggctctgaaagtatccttaatttactcaggtgacaacaattagtgtttaaagagttagttttcaatcttagctacaagttggaattactctggaagctctaaaaaaacaaaaaacaaaaaaaaatagagatgcctagttcccacctgcagaaattctgatttgatttttctggtgcgagacctgagaataggaatttttttaaagcttccctagtgattctagtgtgccacctaggttgccttaaggtaaacctcatattatgcagaacctagcaatcacctatcctgattttatagacgaagatcataagacccaagagggcaaattgatttattcaagattgaatatacaaatgatagaagattcacataagatgcagtatacagagtggcttgtggattcttgccaatgcaggcagcagaattttctttagggttcacccagttcaggcacctctttgcagcagcacttgactaaggttcttctgattggatcattatatgggcaaaaagaaaaagcttaattgaaaagagctgaacccacattgtggaatggaagatatacagtttacacgttataaatgattaatattcatgaaagcatactgccctttcctcttcccttcccatagatgacatcattgcattggtgtagttaggttggtggtttcttgttgttgatcttggttctgacacagttcatcacttattatcctggcttattatctacttctacattcattgttcactcactcactaattaattcaacatggtttttattgttttggaccggttatatgcctgcaacgctacgtaaggctgaggatattacaatgaacaggaaacaaccctgaagtttaaggtatcaagcctttgagttactgtcttttatcatagctgatataaaattgaagccccactttttttgttttcaattactgaaaattcagtgctaaaaaaatgtggatttttattcaactagataaagtactacaattaggtttccactgaccttggctgtttttgttcccagttgccattacataaatctgtgccactcacaacttaggaagggtgtaacattctctgtaatagtttgcctttcgaatagtgtttggattcattactgtccctcgcagtttggaataatgaccactgaataatcagtgtttggagactaaattagtgctgcaaaattccctcaaattacctactgttcttttccctgtcgatgtatcctcatattcactatgattaccctgagaagaaagatattgttgagaaccactttacctactcgaagttttggtatttcaaagattcatacttatgtcatgttgattacattagcactaatactattggcagaattctaattcacgttattttctttttttccaatttctctccatgcctatgtgttgtcccttcgcagctataaagccatggccgattcatgggtgcttttgttaaggcgttcagcagtcacgtttgtagatttttgaatgggacttagagcccttttttgttctttatgtatttctctatttctcagcaaaggaaatgcagacatgcaagaaatagtgatcaaatgtcctgtgtactattgtgggtgtcattaatggtatagggagaaatagaaaatagttgcaaagatgcatttaacaaataaacgaggtcttgagattcaccatgaatgtggccccttctatgaaaagtagttaacatccaactgcaaagttgtactggatcagtttgactttaacctttagctaatatgaaaatatggaattgtgtggtggtgctcacaaaaaagaaaactcatttttcttaattatcatcaattaacatgtactgactacccatgagggaaagttaatttgctcttgagtggaaccagttatttgccctattatttctcccttgcttattcccctctccctccctcctccctttccattcaacaaagaaaaatagataaagcaatttctgattagccagtgaaagcctctaacataaaatttccaaagatgtgccataaattatccacaaaatgtaaaacttttcaattttggtttgcattttcttttttcttattataaaggtaataagtgctcattatagaatttgaaaaatataggaagttgcacggaagacgaataaaatcagccataatcctacaaacctattgacacttgtacatatgtttgttatctctaatgcattcattatgataatgcatcttttcaaccaatagagtaatcactggtgactttcaaatttgcctactcatttttcactctgtggacttactttactacctcttgccctttttcagtaaatgaataaatatttaagtaagtaaatacaaatgtaataacttatgcgctcaagcacacagatacacacagagagaatttggaacttcggaaatgccatcctctccctagggccgcaagtgagttgataagcacgtaaggaaggataatcaggggagccttctcgtattgcccagatggctcaaaattcgtcatctctaccaaacaactatttggagctttgaagaaatatccatgacccctttgaattcttcagtttctttcgcgttcactttgagaaccaagtgacaagtgaatttcctgacttggtcttttaaacctgttagcgcagttccattgagattttgtgggcacaagattgcaatgaagagatcaacagggagaaattcatttccctatatatgtgcgattaatccggagtgctaagggcagatataaagcaggtgcctactcctgtataacttggaataaaaccatttccaaaggctgatgatcctcaagtcttgttctgcaaatgactgatgtataacttcaggccaatttttctccagttagtctgtgtcactgggagtcccatttctcggggagcagccccatgctttgtcaggtgcggagcccacagaaggttaatgcgaaaagaaggcctcttgccagactgttttccagatgatacgtagggttattagtttgagctccttaagaagatttttctcacctgtcctaccaacttatgtttatttcattggtgttagagggtttcagtggcggaagtaaaatatttagcggggaagggacagcgttcatgggaattttgcctaacttaattttgtatctttagctcattcgtagtcattgtactttgtgttttgtcaactgaattttgtttgcatacaaaggcacaaaatgtttgcttcagacctgtcactcttatttttagcatggttagacaaaaactgagatgctttaattgtctaacttatcccagtttaagtgctgcaaaatctcccaggcaatgtcatgggcaactaagggataaaatcagagatttaaaggtgccaggtttcccacgcttctaacagttggcgttttgggtgtatacaatccctcagctttcttctttagtttatggagtcttgtggagggaatagcaggtttttagctaaaattatcatgctgtcgagttgggtctctagtgcatcctgaagagcttgcattatttacagaggctgggctatcattttaaatcctgatgcttcaatgcccgttatcattcttgacaaactcttccagcccgtggtctgttttcctctgtttgcttccatttactttcctgagcaaccagctgagcaaagatttacataacttttgtttaaacaaaccctgtacagttcactctttcagccagtatgtaaacacttttgagacacagttacatttttctattttagtcccagattctgtttatttgctacattttttgtgcccacatttttgtctttgttaagtctcttacagattcacatgaaaaaccagaaaccgtggctgctcaaaagtcattaataatgagatttttagctactgtttctgcttgtaaattcttcatttcacataatacagtctcaaaaggccacagagaattcagcctcgcttatctctgtgttgcagatgatggcttctagccttacccaatcccagtgcagcttgcttgccatccaggagtcgaatttgtttccatctgacattagcgtattaaaaagattggagatcaacaagcaacaatgttcttgtagaaaggtaatcaaggtttagagcctgtgtgtcatgagactcctagcatttgaaaccgctaaggggttgaccaccattgtcccaagcacctgtttaagattctttcctatgataagggacctaaagtgattagcatactgataagattttcctagaataacctatttatttcagtattattctttcaaatcttaattaccatcttttcctttacccagggtcttctttctacctctacgacacatttaattacctatattccccaacctgtaccatattaaattttgaatggaagttttatagggtaatttattggaaggatggccttgagtgtcattatgttcaatgaatgccctattttgacaaagagatgactaaatgttattgaaatctttttaatccaccacgcttctgcttagatgtaaatgcaaatctgttctttacatttgtgattgaattgaacttgaaaagtaccgccatattgattccttctgcaaataaaatataattacatttccctaaactttctacactctcccaagagattggctggctttgtattgtagatttttggtgatcacagaggacaatgcattatcataagaccaataagatttatttttaccttggtaaagaattttaatttatttctagtttcattttcatttatatccatctcttctcaccctctgctctacaaaagtatatatgactatataaattgaaaaaaatatcaagtgcaaaattacagaaataaataattaggttattttagtggaggaaggtttgttgtgggtggaggaggagaggagtgagccaagaaaaacgagggaccatacgtgatcatatttttgcagctattttaaattgtttgtgtatatactttaaaatattataaaataaaattttaagtgcaatgcatatttggagccaatgatgagggataacttcagaaacgtagcatcatcatctagtgctttcatagtcctttcaacatttccagatagttttaatggcctgctcatggaggcaatgccctaattttaacatatctcttcacaactctgatttcttgcttcctaacattaaatgtcttcaaagcttctttcaccactaattccttatcaagaggataagccagtttattctttaagaaaaactagctacacaaaaccgtaagtcattccaacataaatccttcactatcctctctctatagatttggttttgattcctcctgctgaaattcaaccttctttcttcagctatccacacgtcttaccctctaacttccctcaggagtgtctattagctcccattacagtgaccacagtaatatagtaatcccctgctgttctcactctccacttccttacactgcgttttaagtctcttcatattctttatcaccttgtatcatgcatcggttttcttagttgtttattttatgttgccttcataaattccatgagagctcactgccgtatctttagaacatggaacagtgcttggaacataatgggcattccttaaatagctgtagaataaactttcaaaatcaacaataatgtatttgccaaatccattggcttctctgccattttatcttgttcaataccactgcgatattccccttcctttttttttttttttaaagtctgtaaccctttagcttctgtaatattcctagttttttattcctctcatgtgtcaaaatcatcagttgaggcttattgttttctctttctcactctgacctcacctttgtttacatctcatcttctggctttggctatcctgttttttatctctgttccaacctgtatttctagccctactacctggacatgacatgtggatatctccgtatgaccgcagtttccatatgactttgcaaattcatccctgctctcccctccaaagtcatccccacaattgacttcctgttccttccaacctattaaggttcaaacccacttttgctcctcctttgcaggctacacttttccttctcagtacctcttttttttccaagttcttagataaaagtcatagtaccttacgttgtaattgccactggtctggtctttctgcctgctttcctttccatttgtaatcacattatccattccaatccatttataatactgtgatcagccataaaaataacatttatcatatcgtttgtctccttaaaacctgtagtagatcccctctatttacaagatctggtataaaatcacccttcctgatattcaatgcctgttttaatataatctcaatattatgcgtcataaatccccctgtgttcttgcactttttatttcttatacatctcatcaaccatgtcttatcaactctcaaaacctgtattggttttcaggaaaactcataaattattcttttgtagaccttttgtttgtcatctttgaagatctctctctgaactacaatattttgtctgtataatcaatttggaaattcatcaggtattgaaatatgacatgtcttctattgtcttgaacattaattaaaactttatttgactttttatatgcttacatcttgtttcctcacggagtgttaacctactagaaagtaatagtttaatcttatatttattttaattcagatttagtagcatactttacacgtggtaggatgtgtaactgccttacaccttgcttacgtgagttattaatgttttcgtatatttaatctgaggatgtactagcaatgttaaaactgtaccgcatgaaattgagtaattgaactatttgttttaaatgtgttgcttaacttattgtaccattttctcataatcacagctcaagttaactttgtggttgtacgtattatttcttgtgaaatgccaacaaacttagagcaaggaaaataacaggtataatcatactataaaggcaaccttaacactagcatagtctcttagctcatatggtaactacaataatgtacagtgacaaagagaatattgtactttcttagcacacactttcctactactctactgttgtggataaaaacagacatactttaggagaaactatgttatttccaaataatgccttaaaggttactccaggaaaaggcatttacataaactatctaggaaaagaaccttttaaataatataaagagctcacccaaaaggactgaagtgtttagttgaaaaaaagtaaaaatgtcgaagactttgaaaaatagtttcttgcagtatattttcatcgcttccacttacgttatgaagacattaagcgctagtttatcaaaaactatttttgtacatgtcttctaatgacagaacaatgtcaacatgattttcatcattgagaatgcgtaaagaaaccctttgtacagttttttctatgaatgttcccctaagattaaagcaaatttccaacacgaattaggcactccgaaaggaggaggggagggaggggagcaagtgctgcaaaacttcctgttgggtactatgttcactatctgggtgatggaatcaacagaagcccaaacctcagcatcacgcagtatacccttgtaacaaaccaacacatgtacccctgagtctacattaaaaatagagattaaaaaaaggaaatcagtatataatctaataaatacctctcaagctttctcatttttaaaataaaattttagattattattttaggaataaaataggctcttcattgtatataagttcatttctgagttgcaaaaatcctctctttatgtttttttccccgtattagcatgtttttctcctgtttttccccactcaacttggctgccacaatcagaaagcacaaagacaattttttcttgcgcttgtaaatcaaaaccttagcatcagacaaaataactgctccaggtctgtcaaatagattcatttgagctttcttcatgcattgaatacggcagaatttctgacctgaagaaatctagccttttccaaatttgctttaagaacattttgcaataaatttaatataataaaaggaaaaaacacatcaggctagaatttggaaccgattgttattaaaaatctcaagtctatcaatttaacttcaacaaattacttaatttctgtgatggttaatttcatgtgtcaacttggctgggccgcagggtaccgagacatttggtcaaacattattctgggtgtgtttatgaggctgtttctggagagattcacatttgaatcagtagagggagcaaagccgattgttctcccttgtgtgggtgggtctgatccaatcaattgaggacctaagtccaatcgattgaagacctaatcaaaaagcctgattaaaaggaactcctgcctgatagctaaagctggaacacccatcttttcctgcctttgagcttgaattgaaaccttgggtcttcttgagtcttaagcctccagttctggggctggaacttaacgtcattggctttcttggttctcatgcctttggactcagacaggaactacatcattggctttcctgggtctccagcttgctgactgtaaatcttgggacttctccagattcgtaatgagccaatttattacaataagtctctccctctctggtttcgagagagagagagagagagacagagagagaaatgagagcacaagaacgtgagtgtgagagtgccctaatataatttctctaaatatcactggttactcttcaaagttataaaattggtataaaaggtgacctcaatttttcatggagttaatgtatgaaagtcacaattaaaaaggaagaattagttctggtgtcctgaaagttatttgaataaattaatatgctatggaggctttaaaatactatgaaaatttaatattgtattattcttagtgttgctatttttaaatagcactttttcttttcctttttttttttttttttttttttttttgagatggagtctcactctgttgcccaggctggagtgcagtggcatgatctcggctcactgcaagctccactgcccgggttcacgccattctcctgcctcagcctcccaagtagctgggactacaggcggccgccaccacgtccgggtaattttttgtatttttttagtagagacggagtttcaccgtgttagccaggttgttctcgatctcctgacctcatgatccacccaccttggcctcccaaagtgctgggattacaggcatgagccaccatgcccggcttaaatagcactttttcttgtgagtcactttttaaatatttgtgcaaaccttgttgccattctactcaagctaatatcctaaaccgaggacattataacatttcaggagtcaaaacttcagacacttaacatagtatcctcaggttcatccatgttgtcataaatgacaggattttattcttttatatgactcaataatatcccattgcatatatatgcaatattttctttattcatccattattaaacacttaagttgattctatatcttggctattgtgaataatgctgcaataaacatgggaatgcagatatctctatgacatactgattttatttgctttgtctctgtccccagtagtggaattgctgtatcgtatggtagttctatttttaagttttcgaggaacctccataccgtcctccataatggatgtactcatttacattcccaccaacagtgcataagggttcccttttctccatattcttgccaacactttttatcttttgtattttgataatagccattctaactggaatgagatgatatctcattgtggttttgatttgcattttcctgatagtgatgttgaacattttttcatatgttgtattaactaagccaaacacagaaagacaaatgcagcttgttctcattcatatgcacaatctaaaaacatcgatctcatagaagcagtaaatggacggtggtcaccaaagaatgggggaagtaggggaaaagcgagaatggggagaggattgtcaatgggtacaaagtcacgattagaaaggaagaattagttctggtgtcctgttgcatagtatggagactattgtcaacagtaaggtattgcgtatctcaaaacggctagaagagagggttttgaaggtttctaccccaaataaatggtaaatgtttgaggtgatatgctaattttcttgatttgatcaagtaaaggtcttaattgtttggcaattaagactcatgaatacaaataaaggtcttaattatttggcaaagcatgctgagttttgtaaacaattcagtagtgatttttgagaataggtcaatagcaaatattaattaaaatgtcttctatttatgacctacagctagatggtaaacagatagatgatagatagataactgatagataactaatagatgacagataaatgataaatagataaatatagataatcgagagagaatacctttcccttcacacacgtgcatataggcacactccatttctatcatagttaccaggattcagacattttgtctcactatttttctcaatgtgaacatgcatataggaatattatagtttttgttctgtgcccattttagttcgttttttaatatttcaggacaaaggcaatatggcggtttcactttgtttttcatttttgcttatactttttaaagctcagtgtagaaaagtttgaaaatacacaaaagtattaaattaagacagctgggcacagtggctcacgcctgtaatcccagcacttcgggaggccaaggtgggtggatcacgaggtcaagagatcgacaccatcctggccaacatggtgaatcccgtctctactaaaaatacaaaaattagctgagcatggtggtgtgtgcctgtagtcccagctactcgggaggctgaggcaggagaatcgcttgaacccgggaggcagaggttgcagtgagccgggatcacaccactgtattccagcctggtgacagagcgagactctgtctcagaaaaaaaacaaaacaaacaaacaaaaaagcacctatagtctttctcccataggttgccttcttaatgggttttacaccttttgatgttttcttgagttctgtcccattagcaagtagtattgtacaaaaaaaattttatcatcttttatttaatattttattgatgtttaataattagaattattttaaattttatatgtcattttaaaatgcaatacaatatagtaaactcccagatgtgattgtaaataattaattattctcccattattgggcattgggactgcttccacattttggtcactgcagtgaacatccttgtacatgaatctgtatgttgaagttgatttcattccacactccccttcattcaaggggctccaaccattctcgttttctttcagcttctttatatccaggcatataaagttccttcctgactcgggagcgtcatacatgctgttttctccatctggataagtagttaattctgttcttctttgtgcatctcccgtttcagtaacttcatctccaaagcctttccaggtcactttatctaaagttacaccataatcttgcaaatcctcaactattgagcattattagtctccgttatcattattctccattattctctgtgaaagcatcccgtgattttcttttgtccctattaccacaatatgtgtttattccgtgtatgtacatctttgtttgtttattgtttgtctatacctgcaatgaaatgcctaaggtcaggaactgtctgatgcaggatgcaatgcgctcaataaatatttactgaacaaattaattcatttgctcagtcttgcaggcaaatggtacttctgtatatttaaatatctaaaatgaaagcgttactcgttactgttggttgtcaatcaaaatttaaatgtcgatgtttaagcgtgaaagacctctgtcaagttaatctgtacttacccaaaggctattatgtagaagcgacataaatattttcctaaatgttgattttcatattttaagaagacaatgaatgtttcaaagcattttcttctacacagctatttattctggagagtggggcatatgtttcttaatattgttaaaattggcaaggggatactgttgctatatacaaagaacacctaatcatcatgcagacgttttgtttctggctctcagttatgaaaagcagagattttaaaaagttacctttatatgctaaattaggaatggcagaaggtaatattctaatgtttataagtggttcttctctgagtccttggtttctatgtttatgaattctctttttgaaagaaattatagttattattaccaggtctattcttttacattgtttctaattctatggtgatcttcaaaatagagtatcaattttaaatacttgggaatgaaattattcttcccatatcatttctttgtatggcatacattgtgatttgttgtcccatcattgtttcagtatgacctgttactgcaaaaacatattgagataaatcatcccacatactctcggccaggacagacatcacactgttgcagcaacacttcagatgagccccattcaaccttgtgtttttatagagaaggatgccacatgtttatattcatttctgaagattggctcatattatttattgaaacatactagtttaaaaatctgtccatttatataacacctggtctatctacataacttgaattacataaatataaaactaaacttcccctcttctccagtgtatagcttgcaagcaagtgcatgtgaaataaattaaagccttgtttgtgtttttttcatcatgtgagtacaagacttttcaataaaaatgaattacttttgaacatatttgtttggacaacaaacaagagaaaagatctatttgattgatagtggacagaattttcattaagttcaacagcagaaataccacaattgcatcattcaccttcgtgtatcaaaagaaaacagaaaattagatgtgatgaactctacacaaatgttcactatgcatactttacccattaaatacattatcaagaatcatgtcagcatgacattctaatatagcagctttacaaaaacatgtaatctaatctagggatgctgttgtcctctttaaatcagcttcaaacatattctgggttgatatttctcattcttttttgatccacattgtttattcacataatgattatatttaactgaagataacagcattatcaaagtgaaagacaaaatagatgtttaataggaaagtgagtatcgaatcatcttttttctaccaaaaacatctataattatgaagtatttggttaattattttcacaataatttaaaagtgtacaacttgccgatttttttgtactttctacttttcatgtctcgcatatatctctttaatatctaagtatttgagtcagaaaagagccagtaccgaataatgggaatctcactgaaatgtgataacaatctggggcctggtcctgggacctttatctgcaggacaacttggacaaatatttagacccccaattcctcgtctttaccctaggaataataacacatttttctgacctcatacttcacgtggatctcaaatggaacaatcatctgatagcactttatgaagtatatgaaagcaataaattatcacaataagataattgcaattattctttggcatagtattagtgatgtctttatctgtctgacaaaatcaacatttctgtatggtaactgcctttccttgttttaacagaagatcatgccagaaaagatgagtaggtagatacttaacttgttgttcctgaatctggaatgtattgcagatgtcccagactgatctttgttcttttttttccttacaaatttcttttcacattgacagtgtgatatttctttaaatgtgcaatacatagctaaccttatttgtttgtgtttactaattaaaatatctaaactgcttaaaggagaaaattcagttttaagttttattgatttatacccttcttcaatccacataggattagggtagtatgtaacaaaatttcaaactataaatgaaatattgagttttgtattaaggccaaggatgaggaaaaaaaaagtaagtatatatggaaaaagaatggtattgaatgggagttttgatggagcatgttgacatcatgataatacctattatctttatattctgaatgtcagaacaaaattagagcaattttcccttatttccctacaatacgtctgtcttaataattctaagctttcctgatttcagtagtaatctgtattttgcaaaaggcagcatgtttataagatatcaagtaaactaagtttatggaacttgtaacagcatttttaacaacatttctccctagatagttcatggtagacatgaatttattcaaaactagtatgtagaaaaataccattaacaaaagctctgaaattatattagaggagctgaataatgttacttgagaaagaataaaatgttatttatgatttttggtatcttttacccactatatatggccatatctctgaaaaactttagtaatatgtactaatgcaaatatggtagtaaattatgtctacaggtgctgataccatagtagataaagtatgataactttattttaaaatatcatatttaaataattaatatacagtactgggaaagactattttatctattctctcactcttgaataaaaaaatccagaaaaaaataccttgttttggtaagattatatcaatttatttcccaaatgggtagagggttatttttttctgatcataaacgtatgtctcttcattataaaaatccactaaaagtgatagaagaaaaccaaaagaataaatgtaaacaatgatgccattttccaaaaatcaccttcgacatttttctggatattgatacagtctaaatctcttttcggaagactccctcctgtgtaggttccccaactactctgcaatcttatttcctcttgttctgttcttgtagaaaggagacccattgtcaccatgtcaaataacacaaaatggtgcacgtataagatcattgtctctgtccattatttgccagaggacctcaaactttttcaggtggtgggcaactggatgtcatgctgctccttgtacaacagaacacaattcattatttatatggttatttcattttaagaaaatttaactttcattagctggaaaaaaaaagaagtggtttttaagttgtttagaaatgtgaaattcaattttcatactgcaaaagagattcaactgcaaacacaggcacacatgtctggtgtaagaacgagttgtcatacaaacccaaattagctgcctccacgttgtctttgttaacaagtgtttgtttgctccttgttccatcattcagaaatgctctttagcaggaattgatggaacacagtcgcagtgacctcttcctgtctttaaaaatcgagatgacatttgcccatctgcagtgttaacatagttcctcaaagaccactgacagtggggtaggactgtattgcgcaagttctctcatttccctagaatataattggtccagggccagagattttagctcatttagagcagcaaggtgctcttttaaaattccctcacctattttgggcttcatttcccttatacggttatgccttttccagtctgatgaacattctccttgacagagcagacaagcaaaaggagctgcacactgctgctttctgtgtcgtctctatccctaaccttctcccttctgccccaatcagtgaaccttcgtctttctggttcttcttcctccaaatggaagtaaaaaggccctgaatgttgtctttaccattatcacgagcctcaattcattccaagctcagcttttcctcactgtttatacagttctatattgttcttctaatatttgccctcagttctctgtccctcgtttcttcccatgttcatactctattagaatctgagcacctttgaggttgtccatacagtggcacacatctttgttttatactcactgggatgatttgccattatattgtcaaaattttattctaaagagcttttacaggctttcttgagccattttctcttgaaattcaagatcgttgaatctctacgctttttccttcttaatctaataaacatacacccccacatacacacgtgtgttcctgaaagacagatgccacttgactcgtcttatagattgtctaaattgatcattgtgtgtggggataaaagggtgaattgtataatatccctgatggttcacgaagtctgttcctgtataacctgattagtcttctgaactcttttaaattctgtctgcaaatgactgaggtttggcaatcagcctatttcagttagttgttttcttgcataagaagggtccatatgtactgtgtgaagtaagagagagaaagtacttagatttgctggatgccctgattgttagcatggctaaggtattgtgtaagtaaggagagcagttaaaaatgatattgtttttatttcttaattgaggtaaaattttatataagatgaaacagacttatttgggagaggaggaagagtttgttcttacataacatttcaacctgtcatatttagttgagaacttcaatctgtcaagatactttgtataatattcagattctgccatctaatatattttccacgctttcttactgggtgtgacagtaacttatactgtggcaggtgtataagttagtaaagatattaaatgctcaatctgttaacttttgtgaagtggtcccactgataaagtgacacctcaataaaataaaaatttccattacctcagaaagctttttcatgctaccttccagtcaattcccagccccaataggcacctattcttctgatttatatcaccatagattagttttgtctttttaaaaatttgtataaatgaaatcatacaaaatgtactattttgatcagcatactacttttgagattcatccatgtaagtgtatcagctgttcattcctttattgatgattaatattctattgtatagatataccacaatttatttatctattctccttttgatggacattcaggtggttttcagtttttggctgttatgaataagatgctgtggacatttgtgtacaagccatttgtgagcatatgttttcatttagtttgagtaactctgtagaagtggaatggctgggtgaaatgtttaaatttatgagatattgtcaaacagcacctaaacagttttctaaagtggttgtgccattttgcaatgccaccagtgatgatggagagttccagttactctacatctttgtcaatatttggtcttgtcagtcattttaatttttgctatcttacagaatatgtaggtatattgttgtggttttaacttatattcctctgattactagcactattaagcatcttttcatggatttattggacattcatatagattatgtgtgttgaagattattacctttatgattattgggtgaaaatagtatcattttgaggtcattcatataacttgaagactgggaatgacagacattttcctgttttgtttcttttctttttactttatctgaagagtctactagaatgcagtgttgctgcctgagcagcagggcattagctttgtaaaagctctgttccttggcaaccccaccactaatatgaagtgcagaacatttgaattgtctttgaccagcttcagcatcagcactattttttttttttgctagacccctagtaggtatttaaaagtacagaaatagaatttaatcatgctttttaccaaatgtgctatgctcttagagattctttcaacgtgcataaaaattctgcagtttcaccacataccagtaaaagaaactcagtcactcatttagccatttagtaaaaagaacaaattaactgatgagcatagtggagacctcaaaggtaaagaagacaatgtccctgaaataaagacaatcataaattttcaatcaaaataatgaaatttaggctgggcatggtggctcatgcctatgatcctagcactttggaaggctaaggtgggaggattgtttgaggccaggagttcaagaccagcctcagcaaaaaagtgagaccctgtctccacaaaaaaattttaaaaattatctgggtgtggtggtatgcaccggtggtctcagctactcaagaggctgaggtggaggatcaccagagctcaggggttggagactacagtgagctatgattgtaccactgcactcaaacttgcatgacagaatgagtccttgtctctaataataacaaaatttaatttttatagactgtgaaaaaccattatgtagatacagttcaagtacagtatgattttataggatagataacttttgcttgaaaatgtattcccaatttataggatagataacttttgcttgaaaatgtattcacaatagagttagtatttggggcacacctttatccatttaacaaacatgttttgagcactgccaggtagcaacacgttactaggcactagagtgagaaaagattacagttcctgctctcatggatctcatggtctagtcaactggaatgaaaggattacataagtagaggtaaagacacacatgatggaggatggagaatagtcaaaggtctggagaatgaccaggacgtcactgtgagttgtctaattgcactgaagcatggatgaagaattggaaagtcattgtaagaagcctaaaaaggtatctctcagggatgctatgaggttctgaatgttatgtacgctatttgggcttcaacaggcaggcactgagtattcagtataaatttttgagcagggaatccaccagaagaactatgcatctggaggattaatctggaaagattgtgtagaatgttatgcagtgaaagagtctgagatgaaacagttaggagggtgtattaataacataggtgaagtgtaatgaataaccaggctggaggaaaagcaataacgatggaatcaaccgggcaagaagtataacaattaggatcagtaaaatagaatttggattggaggaatgaaaaaaaaagggacaaaacaaagttgaactgctggtatccatactggaaaatacagatgtcattcaaataaataatgtaatgaatataagaaaccagttttaggagtgaagtggatgttggcttgaaaatatttcctttgaggtttcagtcaaatgaaaaggtcctgaaatgctacgtggtagcctaagaaggaagcgttcctagagagaaaaaaattagaaaagatttacatttgataatttaatcttttccttcatacaagctaaattgataagaaagtaaaacctatagttttcaccactcttttacaaatatccctaaccttttagatattcacatgaataattgagaaaaatctaacagatgacttgcttatgtcatttgtctgctttatccttaggttcctctggcttatatattgttcaataaaatacagatcattgatattgtacaatgtactgataatggggagtgaatccatgcttgtgcattcttttttttttttttttttgatttgcagagggcgtgcccagtcaacaagagaggcacaattgtttttatcatcacctcttctcatctaattccatgaaggagagtagtattaccatacaacagataatgagttggaaaacaagaaacctaacctcagaacttaaggcttggggaaaaataaaagagtaatttgtgtttaatgcctgtataacttggcaagagggacatataaggcttagtgatgcccaacatgtgcttagatgtggattgttagttgatgtcttgggggttctgtaatctaagctaaatgctcaaaatcaattaattgatgttagacacagagatctgctttgatccctctttatcgtatttctaggccttcccattctcaagagcctgagaaacgacagctttccttaataacttgttatttgtggtaggagatgaaactttgataaaaacacaattatttttaaatgtctctttttcactctaggctgttgtatgtatttcaaaaagttacttttgaccctttccagaatgagaaagcaatcaagaagattataatatcttgcttagttttctgctcaatttatcaacaaatatttcttaagcaattattaagctgagcagtgctcagcgctgtacttggtgatataggaaatggggaaaagactgtctttaaggcctttataatagtaattacctcaacttgtctgtttcttttccttaccatttcgccaaattcattgatctatcttgttctcaaagcaatcgccatagttatattgtaacacagcattttctagggtgtccccattaagttgagagtgttgacaagaaaatacaagcttatttatcattgtaaaacttgagacacctagtagttaccctaaattaaatatttgttggagtcagtcacactaaagagaacacttactgcattgaacaatttacctacattagacagcatttaaagactatgccacagcaaaggcccatggaattcttgtgaacacagaatagaagtgtattaaggaacaagcttaattctgttctcttaaagcacaacactttctcaaaacatattttgaaatcacctttgaccattttttttaactaataggtgggtgggagttagggtaggaaaacacaagcagcttcatcaaaacgatattctattttcttcaaatttgtggggaatcatacggcctctcaattttctacattatgctaattatgatattaatctctctgccagcaaatgaaaataatacatattagatgtagcaaatgtcaataatgacaaaattagtcatcatgcagatactcagggattcccaaaatatgtttggattatgattgctagctttgagtttgcccagaatcgtttcaataaaaataagggactcaaacacatttggagcaaaactcacatcataaattttagacatagctctgccaataatgctctcagttatattttcagtcctaatatttcctctgagttccagaccagtatcttcaactgtctgattgatactctctccttcatttctgtctccaatgcattaagtcctgtgtatttactttccaaatgccacttggttccatgcacttctctccatttctgccactgactcctcctcaatccaagcgaccatctttcctcactttaactaccatgatatctcctgcttggtctccttacttctattcccgggctcctccaatccattcatcctccagcagagaatgatgactagcaccttccacagtgtctggctaataggaggtatccaatcaataattgacttacagagtgaaaatataggcatggcaaataccagtagagaactacagggttttagaaccaatgacattagatacttccatcaaatatttacagtgtataatcaagttgacttgcacattgtcttatttttgaaaaacaattttgttggctttttctatatgcacacatacatattgtatcaccctctacccgccaaatggcttttgaagaagtatttatgtggctccaaattgataatacctctagagagaagagaaattagaaattttaaaatgacctatgcttcctttcgaatatcacgtcctgagacagtgttttttgagttacgtgcaatatgttccacgatgaaacatttaatgtgttcagaggcatgctagtaatcatgtagaaagaattttatgcctgaagtcacatgttctataaccaggatcacttaataagaaaacaagtacagctgtggacaagatgcctttttatcagggaaaggccaatttgttttctttgcaaatctaagtaaatggagagaaaaacacagcccttaaatgttttctatttgtcctgaagttctcatgaatgagttagaaggcgagaaggattaaataaatccttgaacgtagagagagctaacatttattttagcaaactaaaacctattcgctttgcaaagttctgttctgtactttgtaacaacagttttctttaaaacaagagccaccaattcaaatgcctttacagaatgattgaatgctttcatgccccacctaaaggcattcaaatcattaatcaaacaaagttctaacgccaaaacatgtctgggaccagatttaaaatgtagccctcagtttcagagggcaaaaacttaacatatttatattttcctcactttaggtaacactgtattgaatctctgcttgaaattgaggagcacgtgattttttctttttggcccagggcagcatttcttggaagagaaagaaaaacaacccaagatacccttacaaaacatgtagtacttaaagctctttatgatgaattaattttggtatacacattaatagcagtgataataacaaatctatatatatatatataattgatatgaataagataaatacatcaaaaggaaatttcattacaatttgatattaggtaaatgtcccattaaaataaattgctactgtacataattttccttcagttcattggcaggatgtttgctttggaaaataaacagtctatttctagttttagaaggaattctcattattcttttatagcaaccattatcaggagcagatgggaaattgtaccaagagcatatctactattatacctcacaggaaaaagagagtattaaatgaaatctaacaaggcctgctcctgactctagttcctgtaacaaatgaacacacacatttgtatggtttcagcatttgtattagtaaggtacaataaatgtttactgaaattgaaaaaaaaaaagataacaggagaaagaagaggctaaaaaggtgcattttatttctgatcgttcattgtaaagactgctcctttttaaaataatcaaattttattttatatacagagggtacatgtacaggcttgtcacaggggaatagcgcatgatgctgaggtttggggtacagatctcatcacccaaacagtgagcatagtacctacctgatgagtagtttttcaaccaatgcgcaccctccctccttcccacatctactagtccgcggtatctgttgttcgcatatttacgtccatatatgctctatgtttagctcccacttataagtgagaacatatagtgtttgtttttcctgttcctgcgttaatttgcttatgattatggcctccaactgcatccgtgcttccgcaaaggacatgatttcattctttttatgactatgtagtatttcatggtgtatatgtaccacattttctttatccaatctaccattgtttcacaactagatggattccatgtctttgctattgtgaatagcacaagacaggacctttttatttgactgagttccttgcaaattactaataaaagatctggaggtccttagttaaaagttgaatctgtagtgccgttcaaatttagagatgtattttctgttcaagagaagaaagccctcattcggtcatgcttaatattcagctgtaaagtccaaaacatatgagaatgacacaaatggaaacattttataaatacctatacaaaggaggggcacttagttcccctaggcctcttaaaagtcctctagaaagagggtacttttatgctaactattaaagatgagtaacgaatttgtcctatacaacttaacagtatcgtcaaggaagtagaaagttactcagttttactgggcattggagctaagcttgaaagtgaggaggagaagcggcaggagacggagccgagaaggcagtggggagaagaggaggatggtcctttccatgctccctgttgtactaacatgtttggatattatcttatacttcatatatggactggattcttgtccttctcattctgagctctccttgaccttgattcttacctcctataactttcattctttctttactcaaaaaaaggccatttatttcagccatttttcactgttttcttatccttcctagttgcttttctatactatttttccactcttttttttttctatactattttgcccttctctccattttcctaactgctagatttccccaattttagccatctttcaattgttctgactatcctcaggtgctcccacaaggttatcagaccttccaccaagacggaatccctcagtctatggacaggctaagttgaatgggtcctggtgctgtgcttagcatatgccttgagtatttgtgcatttattttgcttctttacaaaaatccatcatccgatagaagttgaaagaaacttgctgaagcacattaaaatctctgaaaacagtattggctatattttctaataattagcatgactggttaacttgctttatttatcattgaaaaaagtatcagaaactgtatatcaaactcctgaattcttggcactgacgaagagacacaatgagaatgaccttaggataaaaaaacaagataaagcaccatatttgtaggaaattgcaccataaaagtctgtttcacaactctcccaaatttcattttattacatcttttctcttgaccaatcagtaaactcggttaatgatttacctgtctcaaaataattcatgaacaaaattacaagtaaatctcagtattggattcttgaaacatctccttgttcaatgaagtttcctttttcttccctctatttccctgtatttatcttttcttccagttgcattttatctcttctgtttttttatcttgctccctagtttgtgattttttgccaattttttatttcctacataattcatccaatctgtcattgtacaatttcttataactgcttcttagcttattccttttcttcatttgtcacattctatttttcatctattgtgttttcatgcagttttggaaagttttacaaatagacttttaaaaaaatgtacgtaatgttttcatagaaaaggtagtggtttctttttcttatatccttccctgtataaaaataaaaatgtagcagttctttctttgcctatgtttcctctttccttcccccaatttgaccagacttgaaggacttagatatgtaacagtgttattttctataatttaggaacagcttttgacttaaaaagcagaagagaagttgaaaataatatagtaattctacatgtccttcctgcttcccaactctctgcacatgtttgtaacctcccctttcttttttagtgtatctctttcatatacctttgtccccagaaattctgattcagtagacttagaatggaattctgggcttttatattttgaaaagctccccacgggagttagatatgcacttcttattaagaatgaatgcttaatattggaatcaaaacacaataagctttctaactatgatgaataatccaacagatttaattatgattttctttttgtccagaaccaagactagatgttaattgccagagaaatagataagaatgcctatgacagcagtacattaatatgatatcaaagcttggaaattttattggtaatgaataattcagtacttaaaatatttagaagctatagaattaaaattaattaatgttgttcactgtgtgaataaagttgattgagattttacatttaattttgtaaacccagtgttatcttttccagctcagaaaacaccacatacaagctactactttctgttttgatcccttatttttctttcttatgctttatcactgaaaactctccttgagcaggccatgcactgtaaatatttctcctggttgcaaaaccttctcatacaaatgcagtagactgtgtaatgagctcttctttcacaaaattaaaaaaacctgaaagccctgatttgcgattctatacaaatgagatttagatctaacaattttaaattattgcttcactcttagctgttcaattctatctcttatttgggaaaccgaaataataaaaccattgctgattccacaattaggttgtaaaagtcaccgtagccatcagccatgaagcaaaagtgccaagatcaaaactacaaagcaaagaggctgagataaaaatgctgcagcattagtttatagcattataagcagcaataagaattccttgattgcttaacaaagactcaaaaggcatttactccattaccttacaactcaaagaggtattcctggaccagcagtattggcatttttttgaagtttgtaggaaatgcagaattttggtgcctccacggacctaatgcagcagaacttgcagtttagtaagatctccaggagatttgtatgcgcattaaagtctaggaagcaccgctatggtatacatctgatgtgtgcccatgcattttttaaaagtatgaagtaatagttgtaagtattggacactcttgaaggaacaaataagagccatggtctttactctctaaatacctccctgacatctatgttttaggcaaaatttttttcccatttcagtagtcactgatgcttgcacgatgcagtttattccaaaacaatggtgattctcatgtaatagttcatgttgccttaataatttacgttgcctcaagttctctgcccaggccccaatatacaccgagggctgtactcctcccctaacgcctgctctcatacagtggcatagagcccagttttatgctcttggtcacatcatggagattgcacaccacaggctttaacttctgccgtactctcactgcctctaaccctccatatgcctaagttctacgattctttaaattccaaattgacccagaagtctcctccgctcatccttttcactgagatcatccctcttctggcctaccatttgttgatcaccttgctttttttttatcctactgtatgtagtataacaaattatcacttgcaactgtgtcttattttttcaactagattatgtactgcctaagacctagaaaattgtgcttatttatttgaatctctaggaggatcagtaatgggtattaatactaatgactccatggtgatgatgagcctgaacttcctcccttcctttctttctacctctctcctttcctcccttcttttcttcctccattccttcctctcttcctccctccgcttcttccccacttcccttattcatagattcatgcgttcactcagcaaatgcttactgaaaccttccatgcatcagacattgtactaaacaataggaaactatcatgaataagacacaatatctgacctcaaagaatttatgatataaaagtaatggcataaaccgtgattacttttgcaccaacctaatatatagacacagtttgttatgactggtgtctctattactaagcaatgactgtcacatgcaacgctgatctgaacaggtggtaaagagtgagatgtaagcaatggagcaaagccaactagttacaaggaaatatcacatgtttactagagcacatctcatgggcattcaagagagtatggccaggacagcttgtgaatagttcagtaactgtgcatagttttatattcattgtgaggcaccgtgtcaccggtttgctgatttacagagtattttaattgctaactgtatgctaccaaaatttccagtattcgaaaataattttgcttgaatgtagaaaaagaaaaaagccaagaaatgtatgtgaaacgagagtctaagggagctttacctcagtctcagaaaacatgcattccttccttcatttaggaagcatgtactggggtctactgtcagcttgctattgtgtcaaggagtaggagaatacaaaaatattagagaatatgaatcacatctattaggagagttttctacatacgcacattattctgtcagtgacataaggatttgagtcattcagatttaaatacggtaggtacctcaagttctcagatattatttcattttctaaggttcgtatttagttaatatgttattttaatggccttacaaattctagattatcttttttaaaaagttaaatagaacgtaattgccatttttatttaatggtaaaaagcatttttgtttttgtgtgtacttggttgtaatattctccttttcaattgagctatttttctgatactttactcttaaaatttcattcaggaaaaaagtaaacaatatttaagcttgacaatcataaaaatgctctggtgactatagattattttaaaatttattactgtagcttagggatatcttgatgggatgctcctgaaagcaattaattctcagttttttgtggcttctaatgcaaaatacattgacgcagacagaatttgaaatgaattttcttctaatatagcaattaattttatttaaatatctctagagtttttttttaatactgtgactaacctatgtttgttctttttcacctctcgtatccacgatcactaagaaacccaaatactttgttcatgtttaaattttacaacatttcatagactattaaacatggaacatccttgtggggacaagaaatcgaatttgctcttgaaaaggtttccaactaattgatttgtaggacattataacatcctctagctgacaagcttacaaaaataaaaactggagctaaccgagagggtgcttttttccctgacacataaaaggtgtctttctgtcttgtatcctttggatatgggcatgtcagtttcatagggaaattttcacatggagcttttgtatttctttctttgccagtacaactgcatgtggtagcacactgtttaatcttttctcaaataaaaagacatggggcttcatttttgttttgcctttttggtatcttacaggaactccaggatggcattgggcagcggcaaactgttgtcagaacattgaatgcaactggggaagaaataattcagcaatcctcaaaaacagatgccagtattctacaggaaaaattgggaagcctgaatctgcggtggcaggaggtctgcaaacagctgtcagacagaaaaaagaggtagggcgacagatctaataggaatgaaaacattttagcagactttttaagctttctttagaagaatatttcatgagagattataagcagggtgaaaggcactaacattaaagaacctatcaaccattaatcaacagcagtaaagaaattttttatttctttttttcatatactaaaatatatacttgtggctagttagtggttttctgctattttaaacttgaagtttgctttaaaaatcacccatgattgcttaaaggtgaatatcttcaatatattttaacttcaacaagctgaatctcagttgtttttcaagaagattttagaaagcaattataaatgattgttttgtaggaaagacagatctttgcttagttttaaaaatagctatgaatatgactatgaagctaaaaaaagtgatagtgtcacttacctctagtttcaccacatttgtgaatacattcttgaaggggaacttgagccaaagaggtacaagtttaatggggaaaacaaaacctcaaaaaggttactgtcaaattcaatcatcatttaaatttcccttggaatgtattgaaggcacagaaagccaaatgcgtgctgctgcagttggaaagcctagagagtttataaatgggattttgtattatgcttccagttgttgatgttaatgtgtcttgtttcgtaaaggaagacttggcctttatttaccaaatgagactattgttatgaacaatgaaaacttcgttcttttgccaagctcttgcatcccacccatcatccacataataggtggattttaatattcaggaagctagaacaactcattgatgaatatctttcgttaagatgtattaaaaagaagattttggaattatgtcagttgtctttgcccacctcctctttccctctttattcatgttacattattcagaaagtagatacaattcatattttgtacaaaataaacacattagttgacctaaacacacacacacacacacacacacacacacacacacacacacacacacacacacacaccccttgccaaagttaaagaattatagcctcatcaaaagatattttgaataattaagtcttggttttgaaaatcttcttgattatagatagataaaataaagaactaaactttgtagttaaactacttccttaggtaagtcatatacttttttcccagattgaaattcttctcttaatcatacaagtattttattatttagataactgatgtgcttatactatgaacaggtataaacctgtataatgtcatttctgaactaggctcaatctaatccaaattaagatggtaagaaatgagaaaattaaaaaaattgaataccatactataaatatatatatacggagagaattcataaagtggattaaatcgactggaagattatttttctataatatataaagtattgtttcctattttaaatgtcttactcatatagtatttgaatagagtgtattaacattccctctgataactctaattcacctgaattttcaaaatcttgttatctgttattgggctctaaaggcacattataatttataaacaaagatgtagcaatatgcctgtttcaccaaataagctctaaaattttagatctttctaattttataagaaagtggtatatgctgactctgttgtgaaatagtatacaaattttaagttaattacagctagggatttggctgtaattaggaaaaaaattttcccatttaaacatgttgacctacattaaatattgcacttcagtgctttaaaaagtcaagttcagcttccttgagttttttttttaagctgagcttttaaagttgtctatttcacgctacattttaaaaataaatgttaacatatttaaatttccactgagaccacttttgtggcatacttcctcaggatttttatatcacttaaattttatgaaatgtaaaaatgtaataaaatataagtactggttctaccaatatactcatagctatttctaagcatccagtagcaaatcaagtaaaaattaataaaataatattttatgaataatatgttaacctaacaattaattatagaagggctgtaatcacgaacctattgctaatcaatagtgtactctcagtgcaacgcaagcagatgttagaagggaatagaagttatttattgcaccggtgaaaaatatataagatgcctattcaacttaacaacagtagtcttcgtttgtaatggactttaagtacagcggttagaaatatttaacattttttagtccagggacatcaatgaaagaaagtgtataaattcaagctagatgtctatatggagccctgtagttgcaaaactttaagtcttctgaaattttaagatattagaaataggaaaaaaaatctcaaaagttcaaataatagtggacatccaagaaggttagtctatgttggaagcaaatgaagtgtgaaatgtagtcagttagcgatgcagtttaagatagacaattcactacagcttcaattatgtaacagaagaactggatacatctataggcttaagcatgataataatgagtttaatgatggcgtagccaccaaaactgtctttgtacacgaaggaggtgcaaataaaaacctatcatcggctgtaaggggaagtcataggttgatacaaagcaagcctgtgtacaagtctttaagcaagcgtccatgaatagcaaggggcgccatgctcttcactggagaagaaaattacctatttgtctttactaacctctaactgaaattaagcattccttttcattttgaaagtaggcaaaaaaatcacagtagtacaatcagtacctatgaagtcacagatatgtacacatctcattacagttataataaatatatcaaaatatcatttatgcttatcactacttcaaaactgcagtacttattatatgtgctacagggtcttattgttgggctttaaaacattattctgaggaatgtcaggcttcaacagattgccaaagaagtccaaggcataaaaaaatgatcctagccagctgtctgtttatctgcccagaatctcatcctaatttactatggtttcagtcattttaatgtgcagtcactatcttcatacactccttttcttctggagtattctaggagaagacataccagtcgaggggttctggggagccaggccttcaagcaatggattgctgacaacataatgaagaggattttacttagaataatgtcagttgataaaagtttgaatgggagacggaagcaaggcagtgggaagtggaattcctaaattgaggaacctctgaatcataatccttagcaataataattaagatttcaaaacattataattctttcttcttttagacaagtctgatattgcttatcccatatcacagataaggcaattattctactaatatgcattaaggaatagtggttttaatttaagtgttaccttaatgaaaataattttgaattttttccttccccaagtctttttgtgaaaaatttcaaacatatagaaaaattgaaacaattgcaaaacatatgcccatttacactgttttcctccccctaaattcttagagtcaacaattgttaacattttgccatatatgctttttttctctcgctttctctaccctctttctgtatctctcatatatagggcatcacacacacacacacacacacacacacacactttttaacatttttgcaaataagttataaataccattatattttacccctaaataattcagcatgtgtcgctttgaaatacagacatgccatatataaccatgcctgtttattatgctctcctccaaattaaatataatactgcattattgttaatatccattccatattcatatttccttaatagttcaaaaatgtcttttatattttgcaggggagttagtaccaatatcttatcatggctcatgcattacatttggttattattatttttcatccttcttagtctaaaatagcccttccacatttttttcaccgatattgaaatttgaaaatgtccaggacgctagcctcaaaaaatgtctcatctttcaggatttgttttattttttttcccctgatgggatgatttaacttgttctgtagtctctgaatttctagtaaactggaagttaggtctaaataagacttcaagagatgcatgtcaaacatgtttggcgagaatacttcatatgagatgctgtgtattttgtattacgtcacatcaggaggtgcatcatatgaagtagtctcactaaatgctgcaaagttttattacttgcttcaggtggtgactgacagatcttgcattataatgtcacattttttcttcgcaattaataaatcatctaatggctttagtatccattgatgatccttccctaactcagttattacactggggcttgcaaaatggaggttttcctaatctgacatgatcttaacatttaccagctggctttcttctgtttgaaaaaaaaaaaaaaaaaaggtttttcctctatatttatgtcaaaatggactcataaatttttatttattcaatatattattatgaattacagttattattcttgcccagagcttcctgctcaattgtcccaggctcaccttggactttgcctatcccagatttagaattacccatttttttcaaggaactctggttacttttagaggtgaatagtacgtagaaacgtacatctgggtagtagccccttctcaatggaatgtgtgcacctttctggcaagcagtcccaaaggagataatattttcagattaccttggaaatgattcttgacaaatctctttcagaatacatggaagttaaaagtaagtctagacatgttaaaaagcccttcttgtgtgagacttcatgtacggtcattaagttactactcctttaaacctctctacttctgaattcttaaaccaaaatgtactagtatataatctatgctggtttgccatgcaaattaatggtgtaaataagataatgggaggcattcgtaaatgtacttaaaggaagaaattattgtttaaagaccttagctcattgtttgcatgcaaatacacgctgttgattagaaatgagccttatctaattcattaaagtaggcctggttggtcctcttcttgaaagtctccattagcaattcatattgctctatgcgcttccttgtaagacaactgttgtctcttaagttttctttaactttggcttcttacaaattcagaccccacccccaaccaaatagctttcaaccaaatagcttttcagcatcttatttcctacaaattaaaagcgaatattttaatgactcaaatggctctttacagtgtgtgcaatatgttaaatgtacccagtatatccgtgtgaaccagtgctacaagcctgctcacacattcacattttgcccccaggatctgtcccgtccgcttgctctgtactcaaacttcctttttttctcattgccagtttagaccttgactctccatccagcccagagtttggaaactgagtacccacaggctgaatcctgaatgcatgcagtatttttgcatagccactgtttttaaataattgacaacttttaaaaattgagagacctcattttttaaaaaaatatggatttctgtcttcttttgaaaatttagatctggctactaggcactcattactatattttctcttggcaccatcacctacaactgagtaacagatgtttcattttcttgctactcaaagtgtggtctctggtccagagcacagacatcacctgggagttgctaagaaatgcagaatctaataaataacagtcagcatttttaataagatttccaagtttccaagtgattcatgggcacattaaagtttgagaagcattgcctggggtaagcaagctttgtcctcagtttgcagcacctgtcccactttgctcatttatattaattgcttttccatagatatttgattttatagtacctcatgcagacctttgtatgatgatgacggttagggtggtgatggaagtgatggtgataacacttaatattgccatgcactgttccaagtgttttacgtagctcaatacttataacaactctatgaaatagttgctattctccttttaattttacaggagggcaacgaaggcacagactgataaaactctttgcccaagattgcacagccagcaagtatttgaaccaggatgcagtcccgcagtctgcctccggagtccttactctagatcagattttgcattatttatcccagttttgtccatcaggattctctggtatacacttgcaatttcttcctaccaaccttctccttacctttgatggccacacgtagtagcaaaagaattgaacatagaatctgttctgacctatctttccaaccctgtttttcataatttccactatttctgtttatgtctgaagctttgaatgacctgaagttttctgttcttcagcttttgcaaaaaaaaaaaaacaaagaacaaaaaacaagacaaaaaaaaaaaaaaaccgcttcctttggttgaattctctttccccttattttttttcccaaaatcttacacatcccttaagactcatcttaactgctattacctcaatgaattgtgacctgctcttctcaaacataagcagtttattctcttaaggttttcttgcccctttttataacactcatgtaatattgtatgtatatatcatgtatcatacctatttacatatgcttttcccccagcaagattaaaagcttcatgagggcagaggactctcttattgttatctctataacccacagtacttaccagaaagcctgatatattgtagatggccagtaagtactttcttaatttaaatcgtaagaattttattcacattcagattaaactgaagatttaaatctttacacttgacattattatatagattaaaaatagatctaaagagccagaccaatttttctgtttttatcatgttatcacatttccatggatacgtttgcaattctagaaattgaccttgatcccttctagtcttaaaaaaatggaaggagtttggttaataatattttaggtattcttcagaatttagtacatttaagagacaagtaacttcaatttatttagctagttatggcaaaaagcagctctttgattcaaacattttgtacatttgtttatcctactctcactgtatctcaactaataccttttaagtgaattaagcaggaattagccctgaaactgaatgttttagcctcatcctacatatagccacaagatgttttagatgcaatccatatcaccaaagagctatttttagattgatcagagagaatcatacagatattattattcacaggtgtcaatggaaaagctggtctcttcccatctgttctctgatgactcttgaaaagctttcaagggcattcataattcttcatcaaaagactatgaaaaatcagcttcatagttaattgttttatgtcatattttattttttcaacttggctagttctagtgaaacagactagctggcaccaaatatgttgttgcattggctggtaatgatgataccactgtgtggagatatacaagtgaatgtactttatttgtggccttccatgaactttatgtgcctgggaaagtaggagttagggagagtttgttagggaacgtgatctctgggatgggtcttaaaggatgagaagaggcaaatgaagagtaaatggacatgccagagagaaaaagtgacaggagcaaaatcactgaagcaagaaaaaatggcctacattgaaggactatacacagttcagtataaaaaggctctgttaagcaagcaccattgacttaccctaaactcttcattttctacatataaactgcccaattcccactccaaacctattgatggatattagtaacctattgatgtttttgaaaggtgttcaagtatcctttctggtaccatgtaccttggctcccaccatttgagagtatgttctccaagaggcaacagtctgtggttcctgacctggctatgcaagttattcttattattaaaattgtcctatttaattaaatatcatgaaaactaatgaaatagaaatgaaaagataagagaattgtggtttctatgaatactaaattgaatgctttggaagacttgataaaggtgattagaaaaaaaaaaaaggccagatgcggtggctcacacctataatcccagcactttgggaggccgagatgggtggatcacctgaggtcaggatttcgagaccagcctggccaacatggcgaaaccacatcgctactaagaaaatacaaaacttagccagacgtgggcctgtagtcccagctacatgggagtctgaggtgggagagttgctcgaacccgggaggcggaggttgcagtgagacaagatcatgccattgcactccagcctgggtgacagagtgaggaaaaaaaaaaaaaaaaaaaaaaccacggtgctgttgaattagatgtaggtaagacaactgtttaagattgggtatgagggatagaatccccaaaaaatggaggtattttgcattgagattattttcagcatctccaaatctgactgtaattcaaagaaaccaaactaaaagtcacagattatgaaatgtagaagtgttttatgcaaaaagtaatatgcttaacttcaacctgtgggcttttactccaggaaaagtctcggaccccataccaaatgagaagtaaatgagtgaccacttgtatattctaagaaaaataaaatgtttgaagatgtgtaaacacatttatataatccctccaattttacaatatttttccaaaaaccgcctatccacttaccctaatcaagtttgataaggggacttccttttatatgtaggaaggctgaaaaatgacgccatgacaaatgaaattgtcaagatggaccaggtcatggaagatttgaaatctcaaagaattttttccagggtagaatataaggatgttgggacgtttttatatgctttagatttgcatcctcatatgtccctttgacagttgagctcagagtgaaaaaaagagagtgaaactagtggcagggtgactcaagttagagacaatgagtaagcagaatagaactttaaaaacctgacagattcaagaaatacttgatgaaagtggaacaatttagtcgttaagtagatgggatgatgaggggaatgaagggacaattctaggatgatcccttttccaggttttttgcttgggggaactggctgcatggaaggctgttagtcaggataggaaatacaaaggagagtaactgaatggaaagaggaaagcaaatcagacatacagagctcaacttgggatataatagtcttaaggagctcttggaacattgaaaataaggtgatcagaaaacacgcatttgaataggtaagtctgaacatcaggaggaagacaagggctgaagacactgagccattttgctgtcaatgtagagatggtggcaatctccattgaactaactgcttctcaataaggtacctttctcaagtcattaatttgctaaccagtaaacaaaccagaattcccagagtacacattaaccattaagcactgctgtggaaaaggagttcaggtgtcaggaagccaacgtggcagatgagcactagtggtgacaaatgaaccaaagtgatatgggtgatctttatggggccacagagtaccactgtaaactatcacaaatcagaagggttgacaaacaaaatattggggataaatcagggaaaacctaccacaacatacaggaaaataagttcaaagatttcatcctacagattgcagataagaaatgagccctttttatttggggcaccctagggaaagagtagatgcccatatgtatatttaaagtatgaatacagcatttatttgaatatactgcaaatggtcaatacaagggtagctacagagcccataacatgaaaaggaaacacaaagaaatacatgccccagtcagactccttacttgggttgctgtaaattctctctccctttaaggttattgcatttaaagtctatctgttgattggacccaacagcagctgcaccaagactgtaccatttttaaaaaaaaaaaaaaaaaaaaaaaacaggccaaatggcattctgcatttattttccttgttgctgaagaaacttgaattgtctaccctcaaagcctgtcctttgagacacattttataattagaaacacttatttacaaagttctttttatgttagaatcacaaatcataacactccaaaaaaggaatacactatcctcaggtgagtgtcctacctttgtttacaaaagaaaacccaaagtcctaagagaaaaatgtgttgatcattttattgattccttaccttggtttaatatagttaatggatgtcttagatatgtataataagtctattatcatgttccctttaaaattctcttttgttttactaattatatgttgtcatagtttgaccattaatataagtctaaatttattataatgtgattttttctacaaaggttaatttgaattaaaatattttattttatctctctctactatgataaatgtttttaaaaatcgtttgtaaaatgaaagtactatatttgtgtaagctgccaatctaacaatttatcatttaccattatgatggtgaatgtataacaatccttatattcagcagaaagccttatctctcatttcagaggaatcttgccccggttaattattctgtctcttgaatgcacacaaacacaagcatatctttaccctttttctgctgcctcactatccctgatcaggtgaatgtttttagctcctagattacaatataaatatattcagacattcctttccaaatgcattcattccactgtacttgtcagagttcatagctgtgaataacagaacccagtttttgttgatagaagcggaaacggactttaggagaaagatacagacctgttcccattcctaaacaaagggatagaaaaccagctcaaaatgggcagaactcaaaaaagaggctcagctccaagaactatagtccaaatcataccctagattggatctcgaactcttggactcaagcgatccactcatcttagcctcccacagtgctgggattacaggcatgtgccacgacgtctggcccccatacactagatgtaaacgttgccatgcaccactctaccactgcagacactgggtgaagaatgtcattgctactggaaagaattctagatagtgccttataattctgtcactcattccagattcaaaaactgaacttcccccatcagattccatttgtatttggggattttgttcgacataatcagggcattcagattctgggcaaccaaagttaacaaatgtctcttacttcccctttcttgttattattcccatttgaatcttcttcatagttagtcactgttacttaaacacacattctctattatcacatttccctctcctctcttttgctgtttgcttttgatccaaaccactgctcagaaaccattattgccaataacaacaatgatttcttgtagttaaatccactggacatatcttagtcctattatccgtaggccatgtgccattaactgaacactttccgtattagcacttggtcctatcttatcttccaagtcactaatcttatctgaatttattcttacctctctatgtaattccttactatattgatgacactccttgctttacctgccccttacatcctgatgtttctctaggacatgttctgaaccctcccttcttctcattctatacggtttccctgattgttatccatagcaacaaatgtagctttcactgtatcaattagaataatatctagggagattaaaaaagaattatagtaactgaaacaaagtagaaatatattcatcttcttgtagaaggaatctgccagtaggtagtccgaggttggtatcattgctctatgatgttgaagatccagatcccttctgtctcacagatctgccatcctttggtgaggtccttacactcatggatcaagatgactatcagctctctatctatcacaactgcttttcaaaggctgcaaggtgtaggaagtggacaaaaaagggatacctctacccttttaaagggacttcatggaagatctacacaacactttagcttgtatgtcattggccagaatttattctcatgacaatgccaaactgcaatgggcattcaaaatgtagtggaatggatcatgggctaagcagctaagcagtctctaccaaagtcaccgatttcattttatggcctaagtctaatatttggcccaatatatagtttcagattagacctacatatgtagcttcaaatggaccatttcctcttctatgtctcaaagccatctcaaagtcagtatatccaaaactcaacatgttatattcctctcccaaaatctactgtgggtgatatcactatctattcatgtacccaaactataaatttggaagttacaagagctagtattaatgacactaagttttgtgcatttactctatgaacaggactttgataagagttttacaaatgtttcccacttaattgtcgcaatatctcagttatagagattttatacgtccatcatctcacctgactcttcgagatcataagcaaagcatggcagcattcttatgtccattttacaaattaccacattaagcacaagaaaaaacaagatatatgtccaaggctaaccaaagttatagaaggatcgagaactaaaagtcagtgatttagacccagatctgtgccttttcccttattgttacatatgaccatatctagctatgtgaacaaagcagctaatagtgacgacagggtagaacaaataagaaagtgaatattccccactacatttatgattatttgccagtttaacagcttcaagcctgtgtcttctcagatatgtgcttcctcttatgtctaaggaaaagtactatatttgatatgcttttatgaactttcttttttgagatggggttctggctctgtcactcaggctggaatgcagtggcatgatcacagttcactgcagccttgatctcccaggttcaagcgatcctccaacctcagcctcctgagtagctgggaccacagacacgggctactacacccagctatttcttttttttttttttttttttggtagaggcaggatttcactgtgttgcccacctggtctcaaactcctgaggtcaagtgatccacccacctcagcctcccaaagtgcggggattacaggcatgagccaatgtgattggcctgaattttttaaatttaattttattgaggtaaaatatacctctatataaataaaagtaaatatacctttaccatttttaagtatacagttcagtggtaataagtaaatttatgttatttttcccctttgtcccctctccctactcctatttctgatctctggtaaccaccaaggtagtgtctactttcatgagatccatgtttttagctcccacatgtgagtgacaacacataatatttgtctttctgtgcctggtttaccttacttaaaataattacctccagttctatccacgttgctgcaaatgacaggatttcaccctttgtatggctgaataatatcccatggtgcatatatatatatcacattttctttatccattcatcctataaattttaaatggtgtggaatttggagaatacttaaggaaaaatgacgattgtgtaaaaggaaagtatctacaaaagcaaggtttatctaccccataaagataacaagagaatctgtgaatgtggatacggtttctggagtgtttcagaggttgaaagattgtgaagaactggatgggtataaaaaaaagtgaggaggagaagaaatgaaagttctggaatgttctgtaaattgtagatgagttccctatattaattttaaaatgtaaattgagattataattattttttgatgatctatttttgctgggctgattctctgttggtgtaactctttaacgaatatgggtcacgtgggaccctggattttattagaattacatgtgcgaatcaaattctaactttatgagccaatataatgattgtttttttaatgattagagtctatccatgacaaaaacagcttgtttctcctactgacttatttggtgttttcttgctaattagcctttatactaggcagtagtaaatcagagtacttggacttcaggttggccattacataaacctggcaactaaatgctgggtaataatcacctatcttcccacctgtgtttattacctttggaagtatgtaacatggtatctttgcgtttatatttttaatttgttcttttttctcttgcaccagctacttaaattatctgagcttccttttactaatccaaaaataaagataatagtacatatttatagagatgttgtaagagtaagaggtaatgtaaataaattggctagctctatgcccagcacatgagtaggtgcttagaagttagtgtctgggtacatgacttctggggatgataaagtgagtagctcgataaatctccccaagaatcagtaaaatgggacacactggagaaaacatcttatgaccctggatatcaaccaacggcatatgctaaattaaaaagtgattatttataaaaagtactaaactttgtatatgaacaatatgaatttgtggtgtatttgcctgtattgcccccagtccccactcccagcttggtcaagcataatagttctatcaaggtagaacaagccatggaaataagcagcttcatcaccacagggactgattttatttgaagcagaagtttaaaactccatgtccagaagcattgtcagtaacggtggagacctaggcggcaaacaaaaaggcagaatagcaactcagctggcctaaagttgcagtcttgattggaacaagtaactgactggcagactggccagaaatttaatttaaccagcatatctgcaaaatgaggcagccgtaataggcctcagtaaggactccttgtgtctccttcatgaaaacttaaaatgtgcctgcatgttgaatataccctttaacacatataaagaacctttagcaaaacttggaagtcttactggcttgaggtatttaagatcaactgctggccaactattgactaatgcaaattaagctatgcttacctctaggaaactaggcatacagtttgtttctgttgtttgacagagaaagaatatcaacagccacacactgtggggaaacagattccacagatttcatctaggcaagttattaaaacttcaatttaaaaaacgctgggcataagaaggaacatcagaatttggggctcctttaatatgttatttaaaatgtcaaattttcaagaaaaatttacgatacgttcaactgtgacccattctcatggggaaaagcagtcaacaaaagttgtctctgaattggcccaggtattggcagatagagacttaaaggctcctactataaataccttcaaacaactgaagaaaagcatgtttaaataattaaatgaaagtatggtaacaataactacaaatagagaatctcaactaaaagatacacactatataaaagaaccaaatgaaaattctagaattggaaagtagaataaccaaaatttaaaaaaatcactaatggggctcaagagcagatagtaagacagaaaaaaaaaaaaatcagtaaatttgaaaatagataaataaaaattatccaatctgaatgtcagaggtaaaacagtataaaaaacgaacatgagtcatagctttgtgtcaaaacattgagcatatcaatgtagatgttacaagagttccagaaaaaaagagaatgttgttaaagaggcagaaaaattatttgaagaaataatggccaaacacttcacaaatacggttaagctcaacaaaccccaaatagaataaacacgaagagatcaataccctaaaacataagagtcaaactattgaaatagtttcatttgaaattattgaaagacaaatgggaaagtctttaaaacaaccagaaaaaaatgactcctcatgtacagggatcacatgattgatagttaatttctcatcataaacaatagaggccagaggtattgaaatgacatattcagagttctcagagaacacaaaattgccaaccaagaattccgcataaaacaaaactatccttcaaaaatataggtaaaataaatatattaccaagttgagaatgagaatatttcttgctagctgacctgacttacaagaaaaaactaaataaagtcattcaggctgaaaagaagtgatattcagtaactcgaacccaaatgaagagataaagaatcacagaactgataaatatgtagatacatataaaagactgtacaaatatagatatatgtttttcttcttttaacttctttaaaagacctaagattgcataaaaattataacattgtgttattgtgtttataagcaggaggagcaaaaatggagcttagcagagaaaaatatctaaattttactgtgttaaattagtttgaacttaagtaaattatgatcaattaagatgcatatgtaatctttagagcaagcactaagaaaataaatagttaaaaacaaaatttaaaattacacactaaaaataactaacaagacagtgcagtaaaggagaaacaggaacaaaaaagacatgaataagatgtgaaaaaatacaatatggcacatgtaattgcaactaaaagttgagaattcccattaaaaaaatctgaaatttgaaatgctctaaaatgtgaaactttctgaaggttgatataataccacaagtggaaaatttcacacctgacctgtaatgagtcacagtcaaaacacagccaaaactttgtttcatgcaaaaaattatttaagatactttataaaattacctccaggttatatgtataagatatctattaagatatatatatatacatatatatatatatacatatatatatatatacacatatatatatatatatatgtatatatatagtatgtgtgtttaaacttaggtcctatctccaagatattaggtatatgcaaatattacaaaatctaaagaaatccaaaatccaaaacacttccaatcccaagcattttggatatgggatactcaacctacatatcaatagttatagtaaatgggagtgaactaagcattccaattataggcagagatttcagacaggattatttaaaatatccaaccatagtttgtttaaaagagaaatgtattagagccaaaaccatataatttcaaagaaaaaagaggtactatgcaaattgtttacatataaaaaatgaagtgacaatactaatgtcagacaaaatagactttatgacaaaatatgtaacaagagaaaaagacatttttaattatataaggggtcaattaagcagaaaatataacaattataaacgtatataattaataggaaagtcccaaattctatgatgcagaaattgacagaattcaaaggagaactagacaattcaacaattattattggagacttcaaaccctactctcaatagctggcaggccaattagacagaaaaatagcaacaatatagaagaattcaccaacactatcaaccagcttgacctaactaacatttataggagacgccaccaaatgaaagcagaatacatattattttaaagtgcacatgaaattttctctgggatagattctatgctaggtcaaaaaacaaatctcaatacactcaacaggcttgaattcataaaaattatgttctcttaatatgtcagaattaaattggaattcaacagaaggaaatttggaagatatcaaaatattttgaaattcaacaacttctaaatccattggttaaaaactaaatcacataggaaattataaaatattttgaactgaataaaaataaaagcacaacatgtcaagatttataggatgtaactaaagcagtgcttacagggaaacttctagttttaaatacctattttagaaaagaataaaattcttaaatcattaactcaagctttcgccataagaaactagaaaaagaagaacacagtaagctcgaaggaagcataaggaaggaaataacgggggttagagcagaagtcaataaaatagaagaagaagaaagaaaaatcaatgaaaccatacattaatctttgaaaatattttttacatggagaagctttagctagactgaccaaaaaaaaaagaattaccaaaatcataaaggaaaaaggggtaattactaccaaccctacagaaattagaaagactagaatgtaataacatgaacaacattgtcaacaatttctgcaaaacatattaaatgaaaaaattcttagaaagacataaattaacaaaactgattcaagaaaaaaatagacatatgaatagacctaacacaaacacagaaactgaattagtaatttaaaattttccaacaaaaaaacccaggtccaggagaaagataggaatccgaggcatccacagtatagaagaagaaatgaaactctctttattcacagacaatacaatcctgtatgtagaaaaatctgatatccacaaaataactgctagatctgataagttcatgaagcttgcaagataatcaatatacaagaataaattacattcctgtgtactagcaataaaaaattgaaaatgatactaagaaaataatttcattctttgtagcataaaatagattaaatggtcataaatttgaaaatataagtactaaacctgtactctgaaaactgtaatacattgctgagagaaattaaaaatctaaataaatgggaccatattccatgttcatgaattggaagactcaatactgataaggtagtgattctccccaacttgttctatagatttaatgcaatctccatcgacatcttagcagatgttggcacaaattgaaaaattgcacaatcttggcacaaattgaaaaattgatcccacaatttatatatagcaattcaaatgtaccaaatagccaaaacaattgtgaaaaagaagaaaaaagttagaggactttgaaatcaggacattacctgatttcaaatcttgatgtaaatctgcaatgatgaagacagtgtggtactgtcataaggacaggcttatagatcacctgtaggtttaggaaacaaacctattcatatttttttcttaaatctactaactgcactcctaatgttgacaatggaagagactcgatagtccagcaataaactcttatatttatggtcaatcaatatatgacaaaggtgacaagataatccaatagaagaaaagcttattattgggtagcttattgttagtgtacagaaacagagctgattgttaatacaactcaacaggaaaaaggcaaataacttgatttttaaaatatttaaatatatatttctccaaagaagacatagaaatggccaacaggtatgtgaaaaggtgctcagcatcactagtcatcagggaaatgcaaatcaaaacctctgtgagatgaacactatcatctcacccctgttaggatggctactataaaaacaaaccaaaaacaagagataagaaatgttgttgaggatgtgaggaaatcggaacgctagtacaccataggtggtaatggaaaaatgatgcagctgctatagaacacagtagaaaggttcttgaaaaagttaaaaatagaactaccatatgatccagcaacctcactcctgggtatatatcccaaagaattaaaaccagaatctcaaaaagatatctgcactctcatcttctctgaagcattattcacagtagccaagatatcaatacagcatagctgtgcatggaagaatgcatggataaagaaaatgtggtgtattcatacagggaatattatttggccttaaaagggaaggacgtcctgccatatttgacaatatgtatgaacctggaaggcattatgctaagtgaaataagccagtcaccaaagggcaaatactgaatgattccatttatatgaggtgtctgagacagtcaaactcgtagaaccagagagtagaatgatagtaaccaggggctgggcgaagggggaactgggagttgctgttcaatgagtataaagtttcagttatataatgtaaataagttctaaagatctgctgtacaacatagtgcctgtactgtgcacttaaattattattaagaggatatgtcttaagtgttcctaccataagaagaagaagaagaaggagaaggagaaagtgaagaagaagaaagaaaaaatgaagggggcatgagcaaacttttggagttgatgcatatacttggttaccttgattatggggatggtttcatggttgtatgcttatatcccaattcatcacattgtatacagatgctcctcaccttaggatgggattgtgtcctgataaacccatcataaattgaaaatgttatgagtcaaaagtacattttcaattaatgatattttcaacttacagtgagtatatccagatataaccccatcctcagtccaggattatactaaatgtgtatcgcttttgcaccatggtgaacttcaaaattgtaagtcaaaccatcgtagtcagtcggggaagatctgtttgttaattatggacccatcgtgtacaccttaaatacttaataaagctgttaaatgaaaattaaaagttgactgggcacatggctcatgcctgtcatctcagtgctttgggaggccaaggcaagaggattgcttgaggccaggagttcaagaccagcttgggcacatagcaacattccatctctacataaaattaaaaatgtagccgactgtggtgatgcaagcctgtagtcctagatgctcgggaggctgagttgggagaatttcttgagcccaggagttggaggttacagtgagctataatcatgctaccacaccccaggagaccctgtctcaaaataaataaatagaagctttaaaaaatattggtatctcagtgttcctcattatccactgtatttaaggtttagctacttgtgcttgatgcttgacaaggtaatcttacttttctccctgatattggtatgatgcaaatttactatatatatgacacaaatttatatatgcaatattttctcgttaatggccttttattttactctcattttcattatgctttgccttttaagtcatatagcaaataaattatgtggcattttcttagcaactattaattcaggagaatgggaacagaattctctcatagattcagctggaaggtaatgatggtcagctcccagtggagaaaaaaaaaaaaactcccttcagttttcgtaaacatacagagaaattttctcctaagtgctatgtcagtctgctgtatgtcctattgatctgagaaccagaaaacacatattttagtttacactgccttgactctattgtacatggctaggtctgtttaaaaaagaaatccttgaagataccctttggattctagtattttaaaacggatgcttagctaagtgaagtggtctacttcaaggatcaaaaccaatcttgagtaatctgttaggtagactccctaagttcatctgtaccttgtaccaaatttttaatgaatttagtaattgacatggatgtaaaataaataatacactaataaagttcatgcagaatcaaattttaatgcccagaggtaatgtagaagatattacctgtccatttctctggacttagctcctgcaactctccatttttctctctaaactttagccacactgaattcctagtttcaattcctctgactcgctaagtatttcttctaccttgataaaagctaattcctttgtcttgtaccatctgtattccggctgatattgacatagttttcagggctcaatttcaatgttacttactcagagggactcactgttacaaccaccacagccttttcaatctaagtaagatccactgctcttcttagaaacaggttatattccaaatgactgtaagtgcttttgttcttagaacatatgtctccattcaaaagaccgatagatattcagttaagccctttgagaaaattataaatgttgaggaccttgattattattgttattattgcttcttttctatgttttcccaggactctcaacaaatttgctttgcttttgtactcatggcacataatgagattaataatgtttagaaaacatttcaaaaatacacacagaggagacacatcttagtctaaagttagacatgataccaaaaactataataactatagctgaccagtgaccccatttattcatggaaagtaaaatttgatgcatatttgcctttaggagcaacatacctatgaaagttctgaaagtgaaagtttgtaaaaaaggagtactctcctaacaatcttaatttttttctatatatatgtatggtttgcattaaactcttttgtatgattagtggtttaatgttgatgtcacccatgacaccataagctacgtgtatggactggctctgttttgttcactcctgaatatccagcaaaaatagtatagtgcctggcccttggtagatgtgtaataaatgtttggtgaatgcatagctacacttcaatgcttatcgcattttaatcccagctactcggaggctgaggcaggagaatcgtttgaacccaggaggtggaggttgctgtgagccaagatcgcgccactgcaccccagcctgggtgacagagcgagactccatctcaaaaaataaaaacaataaaaaaaaggagacccattcatgtatctgtatcactgactagcctgtcaacattttgttaactacctcatcaagtagcaaaatcagtacctggtatgtggtagatgctcaaatatttgttgataaaatacagtaagttaatgacaggcgagcttgcctcagtgaaatataatctgtaagtgagcagtgtgtatatcatttgaaggtgccctacttagcctagcatatcacagagattcccagtaaatatttaggcagttcattaactctaaaagttgaccctcatagtcattggcctacattattcacctccctctgtctctaataaattcattggcaaatttctgaactccaactggaatgtttgtggtggatttcttcatacctaatggattatttcaattttcattttacattgtattatttacttgtctgaggtctttataatgacaaactcggcatgcatgataagctgtcattacttatgccagttgacaaggacatattatttttctacaaaaaaaattatcttggccaggcgcggtgcctcacgcctgtaatcccagcactctgggaggccgaggcgggcggatcacgaggtcaagagatcgagaccatcctggtgaacatggtgaaaccctgtctctgttaaaaatacaaaaaaaaaaaaaaaaaagcagaacaaaacaaaacaaacaaacaggagtggtggcgggcgcctgtagtcccagctactcgggaggctgaagcagaagaattgctcgaacccgggaggcagaggttgcagtgagccgagatcgcaccactgcactccagccgggcgacagagtgagactccgtctcaaaaaaaaaaaaaaaagtggtaattgttcaaaatatttacttattaattcattttaaaattgcatgttgaaataaaaaataaatgtttagtttttaaactatctcttctacaacagaaacaatatagtgagaagagtgatcttgttttacatttttgcaaatctctttaaaagttagcttaagagaaggcagctggttcttatatctgtttctgcattgaatgtgctgtcatatctcgcatcatgtagcctctgaaaaactcataatagaatgagagaggaaaaagtcaaataacatcttagtattattacgaaaataatttggacctcacagaaccactgcatgggtctcagggactcccaggggtccccagaccacatttaaggaaatactgtttcagggaatataactatttttgtacctcctgtggctatattcttttaaagaatagtaacctctgtttctgaggaacttagctgcaattatgtgcagagtttaaataagtgaaacggaaataccctttgcctttctgctcgagtatgaaagtgatgatcaaaatgttcccttttctctctctctctctctctctctctctctctctctctctctctctctctcactctctggggaacttcgggtttccgtctctatataatgtattcatattccactggaaacatacatagtttgagaaaacagatgacattttttctgggggtggaaagaattactaccacgaggaattcaaaatacagacacagtaataaaaatcaccataaagcccagaggggaaaaaaattgagtaacaaaataggaggtgaaattataaaactgagtaacaaaaaagaggtgaaattataaaataaatgataaagttggttgtgggttaggaagaaagagaaatataaagaaactggcataatgtaaaagccaagacaagaaaagtgaggcagaggcataggtcttttgactattttccatgtttgattctaaggtaagtagatatagtttctcatagttggaaatgttcgtgaatttaaacagaattaatgtttataatcagatgcaatgtctagtttttctatttgtcctgtgaaataataattgtgtaaagtgctcatgattgtttcaaggggtgaggagtagttctaattatcatagatattttcatgacttcgcataccactggtttatagagattatacagattttcttatatcagaactctcgtatctttaattccctagtagatgtctaagaaggagatttatcacatagcagatggtggtaaacttgagtaaagtgccagatactaaatgcctttggctttgtgggccattcaatctttgctgcaactactcaactctgctattgtagcatgaaagtaaccatagacaatatgtaaatgaatgagtgtagctctgttccagtaaaactttatttacaaaaacaggtggtgagcacaacttggttcatgagccatagtttacaaacacttgctgtatagctttccctggttgaatttcgttaattttatacagaacctgcctcccatacacacacactttgttcttcatggaaaatctccccagactactatgaaataatgttattacttggagatatacaattaagatgatgtcattaggagattattaatataggaactaagcaaatactatatgctaagtactgaggatagggtgcgatcacaatagatagaaaatctgcaatagtttgatgaacatgggaaattacagtatttcctgtgatggaaacattatgaggggctgtgggactacataacaggacctgtgacctatacctgggttggggatgtctaattaatcaaggaaagctttgtagaggaagtgatgtctaacctgagattggaaaggtcaacctggagctacctagatgaagatgtatggaaggacatcccaggcagagggaacattgtatgatgaatcctgatatggatatagtgctggattttaaggaagagtaagttgttccatgaactatacagtgcaaagaaagatgaagaaatagaagtagagaccagatcacaaagggctttttgaccatgttagagaagttatattttatcccattggcactaggatgttgttgagtatatgaggacatgatcagcaacatattttagaaagatctcttattctgaagtgtaaagagtggataagaaggagacaaggtaggaggcacgagctaattagaaagcagtctcagagaggctgttagaaatcagaacagaatggctattattaaaaagtcaaaaaacaacagatgatggtgaggcttcagagaaaagggaatgcttatacactgtttatgggaatgtaaatgagtttaggcactgtggagagcagtttgaaaatttctcaaagaacttaaaagagagctgccattcaacccagcaatctcattacttggtatatatttaaaagaacacgaatctttctaccaaagagacacatgtactcacatgttcgtcgcagcactatacagtaacaaagacatggaatcaacctaggtgcccaccagtggtggattgaatgaaataaacgtggtatacatgcaccatggaatactacacagtcataaaaagcatacagtcacgccttttgtaggaacatggatgcagctggaggtcattatcctaagtgaattaatgcaggaacagaaaaccgaagatagttagaagctaaacattgggtactcattataaaggtgaaaacaatagacattggggactactagaagggggaggaaggagaggggcaagggttgaaaaactacctatcgggtactatgctcactacctgtgtgtggtgggatcatttttaccctaaaccttggcatcacacaacatactcaggtaacaaacctgtacgtatactacctggatcaaaaataaaagttgaaatcagaatgagaaggagcgaaggagacagcgacaggaggatggagagaagtgggcagattcaagagagatttctcaagtggacttatgaggacatgcttattgatacgctctgggagtgagggagagagaagaatcaaggatgacttctacactttcagcttaaaaaaccgggagctggtggagtcatccattgaacttgacagaggagcacgtttaggcaggaagatgatggtgtttgaatgtctgcgaagggaaaaactgaactgggattcaaatcagaaaaaacggtttgaagtcataccctcttaattgcattttctatcggatggtaatggctttgtgacaggctttactgataggtgatgtaactctgcctctgacagatgaagatccaaagcatcctcagattttcccgaagcctgtttcagcaactgtgtagacagcacacacaaaaatctggggggaagtcctagggctcagttagttgattggatctattaaagtagcattggagaacacagttcagtctgagatttcccaaacatattgctctataatttatttttacccagaaactgaattcgatgtgggatagggattataaaagccttcagattccagatagaatctctgaatagaaggcttttgggccacatctagtaatctcctttcctcactccatttctgaacttcttgttcacttcttcgctgtttttaggacgttcttactacactcctgcctcaaggcctttgtacttgttttctctgcttagggcgttctttcccgcaatatttgcatggcctcctccctcgcttctttatttctatattacctatctttattaaagctgctataaaaaaaaaaaagcccacacctcagtggcttaacataatagaaactttccgttcatgcaaactttacaaaaattttctggtcaacaagtagatttcctccaaatggtggatcaggggggcccagggcacttcgcttttgtggctctgatgtctttaacatacggatttcaaaatcactgtgctcttgtacataagaatgaaaaagaacaaggaatattacatatgtggtggtggttattggaggtggggttatgagccaggcttcatattcatgagcatcacttttgctcacactccattggctcgaactcagtcatgtagccaaactaatggcaagggagactgggaaatgacagctagctgcacaattaagagaaatgagtagacttgtctaatgagcagctagccagtccctaccacgaggactttgctcaaatgtctccttctccatggaaccttctatgatcaccctttataaaatcacaactgctccccatcttcccctcaatatttccatcccttttccatgcttcatttttttcctctgtaacacttactgtatcacaatctatagattttatttctttatcttgtttactgtctgcctccccttcctcccaatcggatgtaaggtccatgaggcagggattgctgccgatattcacggccatatcaatggacactagtagaccctcaataaatggctgttgcattgtgattacatatatgcttcacctagaagtagtctcatctggtggcacatttactcatagattgacattaattctctattgttttttccccagcaaaatttgtcaaggtagtttgtcagtagggagaaataaagttgtcaggtggctcatcaaaagttcaattttgagtactcctcctgtgtactcataatgttttataaatacttttatctatgtaagcacgtgggcttagacacaattctaggattaaaacagaaagctctgtatccatattttcccttttttgtacctccttttatgttctctaccattttttttgagtgctgttagtgaagcactaggctaaatcttgggtttctgcaaaaaaaactttaatcctcacaacactctaaaatgtttattgttctaattttaagacgaggaaactgagggctaaagagattaaggaactcgcccgtgttcacgtactcagctgataactggcagcatttagatttggacttactttccatacagatattcgcattgctaaccttcaggtttttccctcatcgttttccacatctactcaaaagttgctaatcatttccttaatagtgaggcataaatgactgagaaatcttgatatattatccccctcaggagcacttcattccgacaagacacaaactttagggaaaatgaacaaatgtctacttgtacaactcaagcaccaaccaggtatggtagacatgttggcttaaaaataaagttgatgcttgggttctgattctgataatgacctacggagggtatggcctgaggaggttactaggtgtgtgtagaaatcaatgttttgttttggttttccctcgggaagggtcaacttatacttgaatccttctgaagtttctcaaattacaagatggtcatttattttacttcaatcaaaacaacaaagtactgtccgggaaagatgtattgccttgacttattctcaatttatgcttattttggaggcttgtagaagtaaacctgatagaggagggcaaaaacacacacacacagacacacacacactgggagaaaataaatttaacacagtttagggattgactttggttgtatgacatcacaattgcaagagttggatgccattgtaaacaagctatggaaagaatactgttaaaagtaactcattaagtggttacatggtgtagctcatggacatatggcacagaaaaaagataaagctgtctttacataacataaaactgtattctgttatgtaaatgtgtgcttgtggcttgcagtaaaattcctagtgaaacattacctctagattcagcagtactatacctcaggccacatggatgtaagtaaagatgatgccctctggaaaactgagttaggcaacaacaagtgcatccatgaggatgcaaatttcaatgttgaaggtgcctgtgaagaatttgaacaaaattgttgcatgaaatatgaatgaagaagtgtgatctaatgacataatattttgtactatataattttaaagtagtacacacaatcaaattaatgaattaaacattatatgtaaacaggtgatcattgtatctccattttctaaagtttctatgttaaaggtgatcaaaaaacttggagagagggacttctcatttggaaaatgggatagtcacctttgggtatgtgatgtatcaatctctagaacttcagtttcttcattgaaagcatataaaaggcaatccaaaggatgtatggaatattaaaagattccactgtgaaactatctagcactttacctgaaacacttgttagatcccctcaccaaaatcatgccatgtgatttggcagtctattcctcttagcgtaagagtagcccgacagaaaatgttcattaagagttaatgttaaattcattgaatttagcaacacatgagtagcgcttcctttctgattatgcaaatctctcaccatcgtaatacgtgcttcctttaatttcattgggaacatttgtaatgtaaatggtaacagagccaatatttcaaacagaagccattctttctaaaaaaagctaaatgtctaaatgtattgaaatgcttctaaaagtaaaatatttagcacttatttgcagatgggtaatgttaaatatctcactcattattattactaccacttgtctgaataaatcctcccataagcattaagcaagtaggtaaacaaagaaataacacttcatgtgatgaatgccaatatgaagcacgtttaaactgttctgtcaagagacaagcctggaaatgctaactgtgtttctttgcttttctgcaatcatctgaatacataaattcaaattgcagcttttaaaacttcaaatcgaggcttttgaaatttcagaaaacacatgcgcttggaaaagcagattataacaaggtcccaacgggattttgtcaccatcttttttatatttcaaagtataaaaaaaatctagataagaaatgactaccaaatgttttcatatttaaaagatgctgtttttttaaaaaattaaatcactggaaaaaaagttttccacaaatatcgtgtaaaaagaaagacagcaaaaagcttagccaaagcttttactgtttaagtgatgatttattctgagagttcttaagagttttctaaattagtatatggttaatatccataaaatcatatgcaagatgctgtctttcaaattgatgctgaaggttaattataaaatgtacttaattatttatagtgtcccattgagtcccagatactctgtgtccaagaacactgtaaatacagaaagtttagcagaattatattggaaaggcagtaattcttcacaaattaacttattgatataatgcaatcccatttaaaaattttcagcgagaattgttttataatttgactgaatgatacattacataagttagaataactaaagtgggagagcgggttaacctaccagaaattaaacatattttaaagctgcaataattgacatagtgcattactgtcacaaaaatctacagtagatcaacaagcagaaacttaaaatatcatgaagaaagcaccataaatcaattcagaagagatggtgctgggggaaaaaatatcagtttctgaaaaactcttcaaggttagaaacaacactatataaatttaagatggattaaatatttggttgttcttttttaacaaatgaaagagtaaaggatcaagaataaatgagaatatctgaacaatggtaaaatggccacaattttaaggatactatcaatgaacataatatcaaagaaataaactgttaaattttatttagaaaaaactactaaaaggcaaaaaggaagctggaaacgtagtctcaattaatctatgtttcagataatgtgaaaagagctcttaaaaataggaaaacacaggaaaaatgggcaacagacattgccgataattgacagtggaaactaaataaatgacaaacatgtacacacatacaacattttcaactttcctattagtagaatacttaaaatatctatggcaagctttttatttgttttattggtatatcaattataatgctcaatagtggcaaaagtgtagtgagacaagtattttgtaactgttggtgggagtttacgagtgttctgagtaccaaccttgacagaaattcaacaatgtgtatctaaatccttaggattcccattgttaacttttcattctcattccagcagatacatgattcaaaatgtataaataaatgtgtttattgtagggttattcattataataaaaaatgaaagcaaacaaaattcctaataacacaataatggtgaaatatagggtacccctatatatcttattactaggatcttaaaaaatcaagtttttaaagcgtaattaatgacctacagagacacatagtagaataataaatgaagaaaataagcatacaatatagggtttgaacccagtaatacatataaatctcaactatgatgaataagcacaacatctctcctctgtactggatattcttgatagaaaaaaatatgctagtaaataatttgagacatatttgaaaagaggggagtgtttgatttagaattttctaaacttgagggttattattatttttttggtttgatattactttttcctgctccttaaatttttgtttgtttggggggtttggggttttcttttccttaaacgtgtctgcttctagatgaaagttgaaaatgtttaaaagccttgccaatgtgtctaggtttttcaaatgtaatcagattttagcaagattttacttaactaaaagtattcagaacactgtgcaaaatcatctggagtcaaatagtaatggaggcaatgatttgcagagtagaaacagagagagagaaaaagatgagatagaccctcaaaatctagacccaaggaattaaatctgcttggaacatttaaacaaataaaggatgcctgtactatactagacgttttcttcttccacaattgattctaaggtcagaatctgaggggaaatggtgctgttccacattctaaaacaaactgccagcaatcgagaccagccacttccccatagggtttactctaaagcaacagggattattatctctattccaagcaatttccaatctcctctgtactccgtgtcccaggcaagattaaaaagactcaggtaggaaggggtagtaagctttgtggggagtgcagtttgtggtaagggacagttccttctctttcatctctctgagtcagaagtagagacttcgagagaatcactgagagtaagtatgtagactccaagaaggaaaaagcatcctctcacttcaatgaatgtttggaatctgcagacctccttcccaggtctgtgtagcttttggagaggccagaagagcaccgtaggcattcctttggctttccatggccaagcacatagagtagaagaagaggaggaaccgtaaggttaaccatacataagaaatcaacaaaaggctttgaaattgacttttcctatttttcaatttaaataagagagaattgtcaatgattaaaattcataaaacgaagaaagaatggactcagaaaatagcaaacatgaaatgttaattattagttcaaaagttagtttaccgtgttttctctgccaactgattgctaatgactaaagtccttatttccagctttcctctctccccgagctccagatctcttgatttattaaactagtagtttccccaaaatatatgagacaacaaaatatactctcagctgaagtaaatagcattcatcttcccagtcagataaggcagaagtacttctagatcagatgttatattcgggataggttaaaaacagaccctgctcccagtgtcccaggaatgaacagtggatgtgcttatttctcattgcatgcgtgtatcaaaatatctcacgtaccctacaagtacatacacttactatgtccctacaaaaattaaaaacaataaatcataaacatttgtaaaaataagcgaataaatgtataaatgaatttaaaagagaatagacagaggggagaatgtaactttacgtgtcccagaacagactttgaacaggctcttatcatataggaaaactgaatgaatatatgcaagcataagtccaataaccagattctgatttacagaatgatcgcaactgtagttctctcaaggccctgtctttgaacaggctgtgtcttattcctgcaacatgctgatctatcttcatgcttcaagactcagatcattatcttctctgggatgtctcccaagcactgccccagaaataacttctcctcctataatacttaatcataatccttggcttacatgcttgtttcttctcattgactatgaaatcctcaagacaaggtatataacgtatatatctttaatcctaatgcccaattgagctcttagaaggtagtaagctcccaatacacatttgttaatttgaagcaaaaaaaaaaaaatagctaatcattcaaaaaactgaattatcacaaatgtccatctaaagtactatatttacacaattaaatgctatacagccaggttaatgaacagactaaaattatatgcaacatggattatcgtaaacataattttgaatgaaaaaggcgagacacaaaggagtataaagccatacaattccattttcataatattcagtaccggcaaaataatcaaagttgacagggtactggttatacttggaggcagtgactgcaaagggataagaggagatttctgagattctgataatattctatttccttctctggttgtacagtgtgttcaatttttaaaacactattgggctatacagttaaattgtgcagtgtcctgtacgtatattacacttcagttaaaagcttccatggaagctacacatagttcccaaaagacaacaaaacaaaaaattttcaattattttaagcacaaacaattttgttcagctgtcttacaatcgaatatgtaagaataaatttatggctaattagcatagagttatatgcattttcataattaaaacttccacgagtacaacatatgttaagtattttaaatcagtttttctctttcctcaaataaggttgtgagtcataattcggaaaacagtttagcatgtaataatttagtgttttattttaaaccaagctgaagccacataaagcagaactgctcaactgagccctatccaaatccttgacccacagaataagaagcagataaaatggctgctacttaaacaaaacaaaaaccttgtttatatttttgtcctctcattttccataagtatactttaattaaacattttaaaacttgtaactttaggttatatacttactttagttggttctcaaccagggacaattttgtccccacccccaaccccccagcatatttggcagtgccttgaaacatatttggttgtcacagctcaggggcgaggtgttactactggtatccagtgtgttcaacaggccagggatactgctaaataccctacaatgcagaggatagctgctcacagcaaagaattttccaaacctaaatgttagtaatgctaaagttgagaaaccttgctcagatataatgacataatgttgttagaatttttattttattcattttaatgtatgtatgtatgtatgtatgtacgtacgtatgtatgtatgtatttgagatggagtctttctctgttgcccggggtggagtgcagtggcacgatctcggcttactgcagcctctgccttccacgttcaagtgattctcctgcctcagcctccctagtagctgggattacaggcgcctgccaccaaacctggcaaatttttgtatttttagtgtagacggggtttcaccatatttgccaggctggtcgcaaactcctgacctcaagtgatccgcccacatcggcctccctaagcgctagggttacaggcatgagccactgcgcctggccaggaatttttgaatcagaatttttcttgttcgattttaatctcttatcatttagagattcttgaaatattgaaattactttgttcaaagtgaatgaattttcttaaattatgtatggttaacatcttttaaattgcttatttttaaattgccatgtttgtgtcccagtttgcattaacaaatagtttgagaactatgttggaaaaaaaaataacaattttattcttctttctccaggctagaagaacaaaagaatatcttgtcagaatttcaaagagatttaaatgaatttgttttatggttggaggaagcagataacattgctagtatcccacttgaacctggaaaagagcagcaactaaaagaaaagcttgagcaagtcaaggtaattttattttctcaaatcccccagggcctgcttgcataaagaagtatatgaatctattttttaattcaatcattggttttctgcccattaggttattcatagttccttgctaaagtgtttttctcacaactttatttcttcttaaccctgcagttctgaaccagtgcacataagaacatatgtatatatgtgtgtgtgtgtatttatatatacacacacacatattgcatctatacatctacacatatagatgtatagattcaatatgtctaaatgtatataattcacagtttttatctttgatttgaaattaattttagattttacttgagaacttcacaacttcatataattttaaaaactgaagaccagattgtggaatcataaaatctaaatctaaatgggaatcacttttttaatctgtcctggttacctacctggagatttgagaagagtctttaaaaagaagaatccattttcttagggaagatctggattgccagatcagtctcaccacttcagcctctacttaaaggcattatattcccccgaagcaatgttttgttttagctgatttgtctgggggtgtgggacgtggtgttggttcacattccatttggttgaatagacatccagcttattccagtggcttttcataccgtcctactgtgatgtctgcttattactgattacttcccttggctgactgacatgctctgattgtgcaattggattaactttcatggttttagttttaggaaagcagctcttttggatctatttcattttagttgtcaagcagaaggtgaaaggggaagagaaattaatatttaatcattccctgttatgtgccaagtattagatacatttacagccactattttatttaatcttcatatcagattttgacaatggttgctattatcctcattttacacggtcacataatcaaagggaaatgaaattggtcctttatcaatgattcaggtgctttacacatgtaaattagagtccaatgtcaaacgtttatttctgtgaaacaagaggtttacacctgaacaagaaataaagtataaaaataaaatatggcgtaattcaataaacaaatatggagcactgactatacatccgatgttttactaggtatttgggattcaaaaatagaaaagagtgggaatcatttgaagatggttataccctagaacaatgaactcagtcttttcttggaaatttatctttcccaaatgtattgagtgtcatatatagtaatataattgataattcattcgaaacatatttagtggcattttcttattaattaatatgcatgagtctattttctcctgaaagaatctagatcagtgctttcaaatagaactcccgtgatgatgaaaatattctgcatcatccatttttgtaacgactagctatttgtgccttttgaatacctggagagttggtcgtgtgactgaggaacttgagattttattttagtgaattttgattaacttgaatgttaatagcgttgtatggctaatgggtactgtagcagacacagtaactttagttgacaaaaatgaagtgttaacaccatggtgattttggaggtcttgggaaagggcatacactatgtggtggtgaatgagttcgagaaatttagggatatgaagtaaaaaatgaggactccagaatgaaactacccaaatttgaaccacacctttgttgcttgctagatttgtgtcctgggagctggtatttaacccctttgtctcagtttccttccatataaaatgaagataattggatctacctgatataattattataatatgaagataaactaagataataaatgtgaaaaggttagcacagtgcctggcactgtgtatattgagagtcaatactctcaatgtcagttacctcttaagatgataatgcaatttctcagcagcaagctacggtatgctatggcatgctatgatacccaagaggctgatgaatttgttcacattgttctatttctgatagagagataggttttcagacactaactttatttggagtgttgctttaccatctcacatttttctcttaaaaaatttatgagggataatataatcgtttattttctacagagatttatctactgagggggtgagtgtttcagtcaatcagctctgtgctcagatagaaaactgttggtatttgaggtaccactgggccctcggtcaagtcgcttcattttgatagactaatcaatagaagcaaagacaaggtagttggaattgtgctgtaattcattttaaacgttgttgcatttgtctgtttcagttactggtggaagagttgcccctgcgccagggaattctcaaacaattaaatgaaactggaggacccgtgcttgtaagtgctcccataagcccagaagagcaagataaacttgaaaataagctcaagcagacaaatctccagtggataaaggttagacattaaccatctcttccgtcacatgtgttaaatgttgcaagtatttgtatgtattttgtttcctgggtgcttcattggtcggggaggaggctggtatgtggattgttgttttgttttgtttttttaacctgaccgtttgctttggctatatgttttgttgtggctagaaaaaatgatgatggtgaatggctttacattaatgaccaaatgccaaaatttataccacaattttttgcataaattattctgaagaatcagactgaagaaatggcgaagtatttaattcagtggccaggcatgtactgacagtatttaagctgaaaggacgtggtctggttctagttaaacaagtgtcataaatcaaaattaattattcacacctgtggtatggacttaataattaatgtacactaacgttcgccacaagtttatttatttacttacctactgatttattaacttgtgagttttcatctttccaccttgcatactatataaatctaacagtaatactatttattaaattaatacatatttattttatataaagcaagtggtacatatgaatttatagtaaaaagcaacatcaattgatccagcactattcattcaaagacaatcatttccccactgtattttcatggcatctttgtcataaatcaagagaacttgtatgtatgaatctgcttctggattctgtatcctcttccatttgattaaatctgtactttaacaacagtacttcactggcttaattacaatcttttttttaaaacaatcctaccgagctataattcacataccattaaactcatttaaagtgaacaattcaatcgtatttcggtgttacttttttaaggtgtgataaaatatataacataaaaaattgtcattttagtcatttcgtgtgtccagctcagtggcatttattacaaccatcaccacagtttatgccccacccccaatttttttttttcttttttggagacagagtctcgctgtgtcgctcaggctggagtgcagtggcgcgatctcggctcactgcaacttccgcctcccaggttcaagtggttctcctgcctcagcctccctagtagctgggattacaggcacctgccagcatgcccagctaagtttttgtatttttagtagagatggggttttgccatgttggccaggctggtctcaaactcctgacctcaggtgatccgcccaccttggactcccaaagtcctgggattacagcgtgagccaccgcgcccagcctccaaaattttttattactccaaccagacagtctgtaaccattaagcaatagttcccctttctctctcttcccatccgctagtagcctctggactactttctgtttctatgaatttggctattctagatcttttatataattggaattatatatttgccactttgtgtctgccttacttccctcagcataatattttcaaggttcatctatgttgtagcatgtgtcagaacttcattcctttttatgactgaataatattccattgtatgtatatacgcaatcattttatttaaacattttggatctggttgtgtaaaccttccactttgttcttcctattcaagattgccttggctacttttggttctttgaataaattttagaactatattgtctatttttacataaagccttccaggatattgattgaaattttgtgaatctggagctcagtcaacatctttacgatactgagtcatctaatttgtgaacattttgaattgtgtcaggttatttattgtattttttaaattggtgatgctgacattctaataacagatcatttacacgactgataaaatatttaggaactaaaataagtaccaattttatgacattaaaaccataatgtgcgcttaagtgtctctatttcaagcaggtagttatttgaaaaaaaaaaatcccttcttggtttctacctttaatgattgcaaaacatctgtgtaaagatacagacttttatgtatggagggaaggtggtgtcccagcaattaaattttatagctacataacaatacaaatgaaatcatccctcataaaaagagaacaaggaggaaggatacccaaaatgttctacaatatctcagtacatcttatgacaaaaagaagaacaaaaattataattgtaggaaatgtgagagaactatctaaaatatacaatagcagctttgtgggttgtgaaagagtcaaggttttatgtgtcctgcaacagaataaaaagtcaaatttttatgatagaaaattaaaactgaggttacgaacaccatcatgtatagacttatattactacagcatccataatatctgtttcctatgccaaaattataattttaatgcaatgtctttgccattaaatgccacaggatttggaattttattcattagtcatattaaaattatttaatcatcttttctccatccatatgcctctgtatccctgttagtttagatttagggatagaaagcaaatgatcagtaccagatttaggtaaataacacaagtttttttaaaagtaaaagaaaatggcttataacactggcagacagtcttgatcttcattaaatctcaagctcttacttattacaggagggtagaaataaagcggaccccctccctgtgtcctccagccctacccttcatccaaaggttagagtgggtgatataattggaactagtgggtcatagttactgtgacatgaatatgtcaattccttagtacatagtatctccaaacatatcctaatatcataatcagttggcaggtgactttctccacagctaactctaatatgctgcattctgcgtattgagccaactgaccccttactcttgtacctttattttatttttttttttatttattttttgagacagagtctcgctttgtcatccaggctgcagtgcagtggcacgatctcagctcactgcaacctccacctcccgggttcaagtgattcttctgcctcagcctctcgagtagctgggactacaggcgcgcaccaccacacccaactaatttttgtatttttagtagagatggagggttcgccatgtcggccaggctggtctcgaactcctgacctcatgatctgctcacctcagcctccgaaagtgcggggattacaggtgtgagccaccgcgcccggcctgtacatttatatttcattactgaagagagaaaacagcaggtgaagataatatagctatttctttaagggagtggtggacagggttgctttaaactgaatatagccattagcgtaaatttatgggtagcttcatgcaatgaaggctcatgaaatgatatcctcattcttgtctaatacataacttgaccttttacagcctttaacaatgatacccgtaagagccacaaagtggggatgttattaaagctagcctctgtgttcctctctctgatcatctcattctatgatcttcacccacacttctgactcaggtgtttttaatatttatccctcttcatatttctttgtattttctctgaacatgcatgtgggtgtaggaggctctctcgccatcatcatcactctcttcctctgtgtttctcacttttaggctaattttcatctatgaattgacacgtatattataggaatttatttttatatatttattaggaatcttctttttgttttttttttttttttgagacagagttttgctctgtcgcccaggctggagtgcaatggcacgatctccactcactgcaacctctgtctcctgggttcaagcgattctcctgcctcagcttcccgagtagctgggattacaggcatgcaccaccacgcctggctaatttttgtattttaagtagagacggggtttcaccacgttgatcaggctggtcttaaactcccgacctcaggtgatctgcccacctcggcctcccaaattgctgatattacaggcgtgagccaccgcacctggccatgaatctacttttctatttgcatatttgccactctttttctgccccagttgtttatgtaacacattctcttctgctctccttccctgaccccgttaatcccagtttcatctctttcatgtctttttattttgtgtcccctttcctcattcttcattgctctttgtatatgttatatgtgggtatttttttaactacccatttatttaaaaccaaaatatgctttatcattctttatttttgaacaccgagtcctagaaaggttatgtgacttatttgagaccatgtagctttctatttaaatataaaagtgattccaaaataaacagtaggggttttaaccttttggtgaagctcaagtgatttttatgtggataatatcctaatattaaaatggggatttattttcttttaaaaaaactatatgagtttttgctttggtttttgccctttttgagaactagatgctgtgttttaaaattactttctagaaccttctctgctgtggaacatttacagttgtgtaatatagcaaaacatgtttatgttgtttcagaattagttaaaatcctactatttttaatgtcaagtaattttacaggtggtgtacgttatgcattcctattagttttaataaatatgttgtcattttgttaaataagtttaaatttttcatcgcattttacatgtaaacagtaatttactatctacacataaaataccatttacaaataagatatactgtttatatgtaaatggtaaattactatttgaatttgttactgcccagacagtataaaatggtgcacataaagaaaaaagcattttggaaaacaattaagaaatttggctggaaagtgaattttagttaagtgcatcttattcactttaccgaggaaaaaggtaggtttacaaatacaacatatataacaaacctttaatatgggaataatttttgtaatattgataataatacaggtattattttcaaaaaatcaccaaataaaaattatgaaagtaaaaatacagtgcaactcctagcacaaactatcttccacaatatacagttggctgtatctaaatttccagaaatctggttcattttgtattaatctctaatcatgttgcttctaaatatgtatctgaggagtaaacatttcagatttattttcatttgtataaggtaaatgaatgtttagtctttttccagacgtatttgctatgtaatgacagtcattattagtcgtcagtataaatgtgaatagcaaaaaggagaaaattaaataaagctagagcttggctttccgactccttgctcaaaaatggacactttgtccaatcaatttcctatcacaagatgacgattaatagattgttctaatagttaccattcagtcctgcccttaacgtgatgttttttcaaccaaataatagaatcttcactggcattgttaccatattgactggtatttatggaaccccggaaaaaaaaatgctgtaaaatatatagtaggaagtataataatcattataggaaatcatttctctagctggaagtcttagcagggaccagatagttccactggagcttttatgtgctcatgattttctcccttgaagtgtatttgtaacacagttcacacagtttttaattttataaatctgtgtgctaaaacgctattatataagaaaacgggccgggtgtggtggctcacgcctgtaatcccagcactttgggaggcccaggcgggcagatcacaaggtcaggagatcgagaccatcccagccaacatggcaaaactccgtctctattaaaaatacaaaaattagctgagcgtggtggcatgtgtctgtaatcccagctatttgggaggctgaggcaggagaatcacttgaaccagggagtaggaggttgcagtgagccaagatcatgccgctatactccagcctggcgacagagcaagactctatctcaaaaaaaaaaaaaaaaaaaaaagggtgttcacctatttattgggcatatagtctgatagttcccagaaacccattatcttgaatgttttctttatgtaagttcctggaaatccattatttggatgttttctttatgtagttaataattacagcaaagctgtaattaaattatttattcaagagctatctattaaaggactactatgtgccacattctgttctaagcatatcataatcacttcccacccttcccttatttaaaggacatgcataattttatagggcttggcattataaatattcatatctctaatttatagttgctaaacagtttgaagctgagggttgggggaagggagtagtaatttaaagtttataacataagcatccttgactttgcctcctataatttcacactgacatgaggtttattactaggttgtgtgtcatgagtacatctcaatttgctctgactgttctggtttttgcctgttatcctatcataatttttaatagctccctctttcattgtcataagtattccactttagaagataaaatatatagagagggtcactctagttatgagaacaaacatcaggcttttagagctaggcttggtccagtgctcaataactattattatcatgattgcttttgttcttagtagcatcatcgtccttgtcatcatcatctaccttcctaatactttagttcagctgagaatttcggcctatccaagaaatctgattgccattattaccgaattaatcactctttaatgacaatagtatataagaatacgtgacatttaactttccaaattattgaaatgttacgctgtgtatggaaaattctttctaaccgtgttttttctctactctcaaatcgtaacaatcgtcaacacagaagaagacttttatgaccaaatttgtggaatttttttccccatacaccaaacagcaggcaccagctgggtgtctctaattcagtcctgacactatccacccagagatagtgtcagatcccatagattgagggctcagtaccgaggtctgcctcctctgcacccccctagcgcacgcgcgcgcacacacacacacacacacacacacacacaccagtctcaagtccaggcctctggaacttctgacccatgggcttcaagttggggttcccatgaccctctctttgggttcaactaacttgctggagcagctcacagaactcaggaaaacactcgctttcacctgtttatgataaaggatattgcaaaggacacagatgaagagatgcatagggtgaggtatggttggggtggagggacggaaaggggcatggagcttccatgccctccctgagtgcaccaccctctaggaatccccacctgttcagctacccggaagctcactggactctgtcctctttgttttttatggaagcttcatgacatcagcattccttccccaagggtatatggtgggaccctctaacaggaggtttttaagacctataatctgaaaggcgagggaacattaaagtgaaaggagagcaggagaaggtcagaggcctgcccctgagacccaacgcaaccaacattataacaaaaaactgtaacaagggctatgggtgttatgagccaggaacctggatagaaaccagtatgtactataataccatataggcaatgccaagaatatggatcagacactttacaaacaaggaaaaagtaaacaggagtgatgaggaggtaatttactgcaggcattaatgatgagattatgaattatggattccacttgctaccagctatgtgatcttatacctactctgtccatacctaagttataacatccataaaattcaaatactaaaagaagacacttccccaggttgtggtgaaaattcaatgaggtagtaaatgggaaatgtgtaacacagtatctggcatattgtaattgctcaaaaaatgttagattaaaaacagtaggagtaatactaaaatagaaaaatgcaaagagcaagcacaaaatcatctctgattctcacctccaaattctccaaaagtctcaccttcttaatcaaagttgtaaatatggctcttggggagaaagctgaactatgtgctactattatgaatgcaacaggtgaaggagaggagagttagaggcagcaagacaaccaaatggctctcgtggaaggcacagaggattttcagccactgctctcctattccgctgatattactttcattttctatgaccaactagcatttcagctaaaatgtgttggaaaatgatagatttttctcctcctattgcctaagaagcccaacaaagccagcattgttttcaaacaccagcattctcacttttaaagtatgaacataattcagaggacttttaattctgaacatcgtttttatcaatctattggcctgattgtaacccagaaatccaagcagaaagcaagtaaactttcacactgcttccccatcccttccccctacctttatttttgacatcagtttccctcattttggcaaagtaaaggaaaagcatttgtagaaggttacactgaagctagataattttctattaggaaacctcaccaaatacaagataatttgttcattccaatataataatgttttaaaaaatataacaaaaatccagcataaattgtgaagcactgatacttgtgtaacaactaatttccatagtgaaacttcattgttgccactatctacatactgaaaatgtatatcaagcatgtaaatgtgtcacttaagtatgctgtgccctagattttatttaaaagttaagctaattttcaactaaaaacaaattcgactattcttagcaatctctcctccccgttcatgatggatttaaaatgatgaagagtataaatgatgatgaaaagagaaaggaggagaaaaatttcataactctgcatcttcagtgtagcatttttaagtaactcctttattagcacaaaggtgtttgcctgaagcaatgacttctagaaaggagaagaaatgacataataaaaggggattttgctaatataaaatgttttttctttccttttgtttctgcaatgcttttacttacatagcaccaaccctgagactagagggagtttccttcctttctaataatttaataatcgtgaaatgatattaaatggaagttttcatatgccaactccttaaactgaggttaaataaggaacaaagattaaaggccatatttaagaccacatattgtaaattctaacccagtttcatttattatatcacctgcaaagccaatatgccatacaaaagtaaaataacagggtgatttttattaaagatcagaatcataccaaaaatgaacttttctgtcaaatctttatactcatacatcaagatgtgagtttatttatgtagctaaaataacttaatactaaatgctgactactatattcatgtcagctgacccctagtgcttcaaaccatagaaaagggataccaaatgctgggttggttgtgtattccatttttgccgtataccacctgccaaggcttataacagatctgtaatgggtttcttaccttttattgtgtagaaaatggattgttggattaggcctggggccagtgaaccatggaaccccaggtttgcaagaaagagtttatcaccctttgatgttatttctgtctcgtgtcagctgagaaggatgagctagattatctgaaagtaagctggatgccaaaatcagcattcccctcatttatccaccttatggttcggggcaagaccactgtatgggtaacaaaagggctgataagggcctgatggagaaatttggtttttctcccttttgattggcttgctgatattagaaccaattacaagacattgacgagagcatttcattgtttgttgctagagaaaatccatcaattttgttgtggaaatgaaagcatttgagctgaatgttgcacttataatttgtgaacattttcagttatcaccgggacaagtatagtccatctttggcatggttggccaagtgtggtgggaaaagagatggaccagcaaatgggccggaaaccaaagtcatcaaaagggtatttcaagaaaactctatttgttctgatggttacattctgcaggcaacctgtgactgatgactgatgcttatacctcaaatgcagtctaaaaatatttttttgtgaaagtgacacattctgactgtgatgtgggtgacatcaacagttttgaataggacagtacttcttggacttattgaaacttttataaaagaatgaacattctgaactcaattgcaatgtaaatgactatcatgaagattgcttctgttggtgctatgacttttgtgacaaattttagaccattgcagttatctcctagaggttgctttattgttttattttcatcagtgatgtgtattttatcagtgatgttagaatcactgagctgctggttaaggaagagaaaaaaattaatattcaggtgctatataggcccttattcattgagaacaaataaaggccaacacacaaaacaggaaaattaatagaaaagacactctatgggtaagatttcatatagtttgggagcagacaaaaactattttaattactaaaataattaagaaagatgttgaggctgggcacggtggctcacgcctgtaatcccagcactttgggaggccaaggagggcaggccacttgaggtcagagttcaagaccagcctggccaacattgtcaaaccctgtctctactaaaaatacaaaaattagctgggcgtggtggcacatgacttgaatcacagctacttgggaggctgaggcaggagaatcatttgaacccaggaggcggaggttgcagtgaaaggagatcacgccactgcattccagcctgggcaaccgagtgagactctgtctcaaacaaacaaaaaaaaaaagattaaaaaaaaagatgttgacattaacatgttcaagtctttatgctgaaactagaatgcagtatgattaaataatcatttctacttcgggtgaaggattagttttcttaaagatacccctttccagcttctcagttcgcgtgtggttaattcccaacgtggcctcaaatattctaatggtttgtgtaatgagtgccaccgttccaccttcttattctccatgcctcatctcagtcctggaaagatcactaaacttgcagttcataactcagtctagacccaggttcaacactcactaactcataactgtgggccacttatttaaatctcttagtgcctctagttcctcatttgtccaacagtgatgcattatgaagcatgtttgcccatctcccagcgtctagtgaggaactaaaaacacaatatatactatcatactttattacgaggagttaaattgtggttactattacaaagtaggttaccataaaattctaatagcagtggtaaggggtaaagatccacgtgccatcacgtagagcagaacttctcaaactttaatgtacggcaggtccttgaataatgttgtttcattgagcatcactgtgttataatattggcaagggaaaaaactgtatctcagctaggggggcactgtctatgtggggttttcttttgtctctgtgggttttcttctagtactctggtttcctcacatgtcccaaactgtgcacgttaggggaattggtgtgtctacattgtccccatgtgagtgtttatgtgtctacgactgtgccctgcgatagaatggcatccctgccagtgttggctcctgtctggtgctctgagttgccaggatgggctctggcctcccaagtccctgaactggaatacgtggcttggaaaatgaatgactgaattaatataaattactgtgaaataaaaattcatatagtattcaataatcataaagatgcgtgacaataattgatgctctacagaagtgctcagtgagctgccatattgattattgtttgtttttgaactttgtggtgagagaaggcaatcctggcagtttatgctttgcaaacatttattccttgaatgaaccaccgccactgcaaacactgtcactcactgattcaccaaaaactgggtaaataattttcctcctggtttttattaatctttctaaagtggatgtatatctcacatttatttctgagtttaatattagaagtgcttggggtctttatttagatgttggatcatgttttgtgaacacaggtatgcagtaggaacttaattcttgtttatcaattagcctatggtaagattggtttcattatatgtcattttgcctaagtcacagtttcccagaatctatcaacaacattaattgatgacttactgaaacaggaatcaccttgagatcttgttaaaatcaggttactgattcaatggctcttgcataggacctgaggttctgcatttccccccctaatttcaagatgctggttccctggtccccttgctctacttcttaaatggtagggaggtagagagtggctatcaagagtctgtgtaggagttgaccaccaatcccattcaatggaatgcatacagtgtgttctgagatactggaaaggcctttgcaaaaagattttgtctcttgatatttatgaagcacattcatccgaccacagaagatacatatcaactttgacagaaaatatgaacacattcaaatgatttatacctttgaaacatagatcgttgtggggttcataacccaagtataactttcccacagattcactcaatttccttcctctttctgtgcaatatattgtatattgcaagaagctcacctccactcaccttattcctcaggctttcttctcaactatcttctgtatagatttaaccagtgggaggcgttggcaggagattggagagcaggagaaggggagatttcagggtatttctttccctctttcactgctttgggcaacagctgatacagagtaagtggccaaaaaatactagctattattaggtcttctaataatgatcttctaaaatcactttttcagtggttacccccattgatttgccatgaatgtctcttcagacatctttgcaaagaattgagcctgactttagatactcattcaaaatcaaaatcagtaattttaggattgaggactctggtattatttaagaactcttaactgtaccaagcctcactcccatttctggctttcccctatatatcagttaagtaataactccaatagtgtaaaatttgcaatagtgttatgtaacaaatcaccctaaaacttattgacttaaaattatcaccatttataattgcacacagtctgtggggtcccgtgagctgttgtgttgttctggctcactcatacattttcagtcagctaatgggtgggctaggggctggcttatctagcataagcgcagctaggatgattcacctctgctccatatggtctctcatccttcggcaagcgctcctgggcttattctcatgcaagaaacaggattctaatagagaaggaaacaagacttcttgaagcttaagcttggagctggctcactcatttctaacacatttttttaaccaaagcaaatcacaaggcaggcccatattcagggattagggaaataggttacaactcctgatggtagcaactttaaaagtcacattgcaaaaagatgtgcatacagagaggtcaccagtgcaatctaccacaccttgcaatctattaagtttctcaccccctcacaagtaaggtattcagttaagatgcattcctatgtattcagatttctaatcaactaatcctgattctcacgtaatattgacacagtatcaatattctcaaaagccaatagtctagagggtcacaaagatcctcaaagatactttatgcaaaatcctaggagtatagaaacagtaccttggtttatgtatacattcagtatttattaagtgtttccaatatggtataatgttaaggaatgaggatagagttatgaacagacagacacttgtctttatggatcttacatttggagggggacaaacattaaaatggattatataattacaaatgcagccgttctcattgtcttttcagatttctcagggtgtagactgagctactataataaaaataccccaagtttccatgtttcaaacaatatagatatgtgtatctttcccacataaagtccagcctaggtacgtagtctctgctctaaaaaggaacacaggctagcaaggcagctatactattctcaatataatactgcatttcaaaatctccatgctggtcccacaaatatccatgcactctctttcttatcatcaagagaacacacagtgccttcccaagagagaccagtcaaagtctcattcacttactgcatccagctaaaagtccattgtctgtggatgatgcactgtcttctccatcagatcaagatatggttcctcatggtccagtgacctataaagtgaaagttatgctatctgctcctaccacaaccaattctctctttttaaaatttttttaaatttttgtgggtacatagtaggtgtatgtatttatggggtacttgagatgttttgacacaagcatgcaatgcataataatcacatcatggagaacgggggatccaccccctccagcattaatcttttgtgttacaaacaatccaattatactcttatttatttttaaatgtgcagttacattattttgacgatagtcaccctgttgtgctatcgaatactgggtattattcatttttcctaagtattttttgtacccattaaccatcccgctgccccctccccgactcctccactatccttcccagcctctggcaactacctttctactctctatgtccatgagttccattgttttgatttttagattctgcaaataagtgagaacatgagatgtttttctgtgcttggcttattttgcttaagataatgacctccatttccatccatgttgttgcaaatgacaggatctcaatcttttctatggcagaatagtactccatttgtgtatatgtaccacgttttctttatccattcatttgttgatggacacttaaattttttccaaaccttggctattgtgaatagagctgcaataaacatgggaatgcagatatttcgtcaatatactgatttcctttctttgggtatatacccagcagtgggattgctggatcatagggaagctctatttttacttttttgaggaacctccaaactgttctctatagtggttgtactaatttatattcctaccaacagtgtgcaaggttttccttttctccacattctctccagcccaggcacaaagacagcagtaagtgctggacgaccacctatgcaagacctagactataaatccagtacttctctccctctccacacccccatacccaccactccattctgagttttcaaatgtaagctaagctaaatgattcaataaagctttttgaagtcaaggatgagaaaaatcgttgctttttatgtaatcccaccatcaaagtaataattgcttagttcaaattgtggtgatgcaaacaaggaaagcaagagagcataaaacgggtggatctgacgcagtccagaagtggaggcaatggttgtttttagataattattagagaagatactgtgatttggtttgaaggcaaagctcactgaagttctctagttctagatacacctatcgaaaaattcttacccaaataaatgtctcagtgataagagcagcctttccccaaatgcctaagtgtttttgttttgtttttgttttgttttgttttgttttgttttgtttttgtttttgttttttttcaaaatcttcctctggaatggatgctgaccttgtcattgacttattcttcaccacaactcagtcatattaatcttgaaagagacagagaggccactatctctgctaataatttacataattgtttttctacaatttggtgctaattaaaatgtgaaaggggtagtgatgatataggtaaatgtaataaggtcattctttgttcctgagagcaaagataatgtcaccagaaaggattgtctgtatattcacataagagcaggaaacaggaagagagacacagtaaggtaaaatagcatactagtatatcacgtagtctggtatagccaatgtagaatatttatttcaaaaaacaaataaagataaagttctgcttcactttgagaagctgttttttttaatcctgtatagttagttcgacatgttactactctgcctggttcaaattttgatttcactctgttccagttatatatgctatgcaacaaaccactctaaaagttactggcttaaaataagatagttttacgatttctcataattctgagagttgactatgatattcatctgcttcacctgatatcaaccaagacactgggaaagctggaaagtccaaaatggcctcactcacatgactggcagttggtgctgcctaccagctgagaactcagctaaagctattggccatgagcctcagtttgtttccattgtcttctccatgtgtctcctttggcttccccacagcttggtggttgagttctgtgaagaagccttccaaaagaacaagcaccaatcttcaaagacttatcaagcttctgtttgtatcacacttgctactatcccattggccaaagccaggcatatggccaagttcagaatcaaaatgagaagggactacacaaaggcatgaatccaagaggcgtgattaattgtggggctgccaaataatcgccttccacaaattccttactagctgtgtcatctctctgtggtctcagttttctcacctggaaacaggaacaaaaatggccctacaaaaatggactgagatatattaggttggtgcaaaagaaattgcagtttgggaccgtgaattttaaatcattataactaggctcaagcacatctttattaatcaaagtaggaaccgttacagtcaacacatttttgccaagaagaaataagtgtgtttattcctgtagcataaaaattcatgctttgggattcaatgaactcttggaaagcattttcttcatcctgctagttgtggaagcattttccctgtaaaaagttgtcgagatgcttgaagaagtggtagtcagttggttgagaggtcaggtaaatatggcagatgaggcaaaacttcctagcccgattcattcaacttgtgaagcgttggttgtgcgacgtgcggtcgggcgttgtcacagagaagaattgggccctttctgttgaccactgctggctgcaggcatggcagtttttgatgtatctcatcaatttactgagcatacttctcaaatgtagtggtttcgccgggattcagaaagcggtagtgggtcaggccagcaggagaccagtgaacagtgaccatgacttttggtacaagtttggctttggaaagtgctttggagcttcttctcagtccagccactgaactgggcatcgccagttgtcgtttaaaatccactttttgttgcacgttacaatccgatcaagaaatggtttgttgttgttggcgtagaataagagaagatggcacttcaaaatgacgatacttttattttcgctctgcttatgaggcacccacttatcgagttttttcgcctttccaatttgcttcaaatgctgaacaactgtgaaatggttgacattgagttcctcggcaacttctcgtgtagttgtaagaggatcagcttcgatgattggtctcaatcggtcattgtcaacttctgatggccagccactacgcccctcatcttcaagactcttatctcctttgaaaaacttcttgaaccaccactgcactgtgcgtttgttagcagtaacttggccaaatgtgtttttgacattgcgagttgcctctgcttctttacaatccattttgaactcgaataagaaaaacgctcgaatttgctttttgtctaacatcatttccatagtctaaaataaacataaaataaacagcaagtaataagtcattagcaaaaaaaaaaaaagtgagaaatgctcattaaaatgatgtataacataatcacatttatttaagaatgtatttcaatatcaaatggcaagttccatgaatgtgaaaacaacacttacttttgtagtcacctaatgacacatttaagaagctgaaacctgagctcagcacatggtaagacatcagtaagtattagttatcataatttttttagtaattttcctacagagctataaataaaatgaaatactttccaaacagtgataaaactataaagcagcaatacattataagcttctatcctaatctgccttcccctcagggccttaaaatgtgtcatttctgtaaatgttacctctgacatgaaagcaccaacacactgttcagcaattacaagttgattgtgacaagagcctcactctccctatttctttttctcttcctgtcttgctttcccttttccccatcctttcactcactttgataaggcaaactgccatgtagtcacaaaatcctagacaaacaagtctgtacctatgtgggcgatgctgtggatttagtaagggaaacagttccttgataaatttctcctttagccctgggtttccaacccctgtgtcattcagctatagaaatcttctgatattttctcccactggtcattttcactcaggctgccatcaaaatgagactacccaatgttctttccatttgttctgttttcttcctcgcctctgattccctgcctggtccacttagaaagtctaccttttttccttctctcttaataccaccaatctctaaatctgacttctcctttctaatcccatagagcctgccttgtcatctccaaacaagatccatcttggcctcctgttatcctcagcccacagcagtatttcacttacaacgttcgttagtttctacctcagatgtgtcaggcatttagtttgtaccaatattttatttctttttatatctacaccaagcctgcactagacggtccaaggagaaatttaactgattcctgttttgaagtcctccccactccttgggagagttaaagattcctcagtgtgttaggtaatgatagttaatatttattaataacttactgtgtatcgactgtattctaagtgctttgcactgttagaaggagaataacctaagactgtgccaaacagcagtctagaacaaagctgaattccttgcttgcctggcaagggagaatgtggtacatactaaaggattaatacatgttcactattaaattgattgattgtggtggtggtgacagtggtgatgacttttcaagtgtgggtaaagtaattttttccaacaaatccacatccacatatttaagaaaagagagacatttcattctatctttttgtgtgcctttgagaggacacccctggcacccaactcccaggcaaatgccaccatctgtgtgattttccttcatttgccaacgaaggcacagcaggtactactaggttaacctttgctttcgcaagtcttctctcaaaatagtaaacacttcagctgttggaaagctctaatctcaaactgcaaatttaaaaatctctctctggagttcaaaaaatagaaagaaaaaataaaaatctctctcttctggaacataatgtttgaactgttacatattattcacactatttcacattatgggattatgaaatatggttttaggtgttagaaaaacgaaagaaaactattatttgttaacactaaccgagagatttttatgatattcaagtaaaatgatagaatgaattattttaaaaatgcatgaatcttcaccttctgtgaagtgtcatggaggattagttctaactaatatgcctgtaagtaactgacttaatgcgtctattggttctcttaatgctgtaagtgacagaaaactggtctcaaactgatttaaacaataaatatgatcaaggttccggttttttgtttcttgttttttttttttttttttcacatttctctgggttctatttttctgtgttgacctagcagcttcacctgacttccctcttggtgacaaaaatggcctgaagccgtttcagaacccacatctgcaaacttacttttgatgaaaatcatctctttagggaccttctttcccaaagcatccaggaaagactgctctgaaactgactggcctgaattaggtcacatgctcattcctgtactaaatcacacctcacttctacagctaaaagtcattaaatctcaaccaaactctacagctgcaccacaacaaaggtagagaagtaggtgcaaagttcctcaaaggaacgtaagggtgaaagatgattgactgataaacagacaggtagacagaatagatagatgaattaggaaaagataaccaaccaatatctgtcacattgctttgacttgattttttagtcaattaatgaaactgaatggtaattttgacattacaacaatactttccaaatgtaggcaggttgtggagatcatttaaggaaaaaatgtatgaggtgttgtagcagatactgtcggtgccccaccgatatccctttagcacttaccatttttatacgtgcttcttaatttccaacttcctgtacttgcatctctttgcttggggctatctctgctcattcttgggagagagcagaaatgtagcagttatgcccctgtagagcagcagttgatagatcaataccctgtcccccttgcccttcagatctaataactccaagcttaattccctacatctttcatataagtatatatataagtatatatatatacttgaagttctagggtacatgtgcacaacgtgcaggtttgttacataggtatgcgtgggccatgctggtgtgctgcacccattaactcgtcatttacattagctatttctcctaatgctatccctccccagccccccaccccacgacaggccccagtgtgtgatgttgcctgcgctgtgtccaagtgttttcattgttcaattcccacctatgagtgaggacatgcggtgtttggttttctgtccttgtgatagtttgctcagaatgttggtttccagcttcatccatgtcccttcaaaggacataaacaactcatccttttttatggttgcgtagtattccatggtgtgtatgtgccacattttcttaatccagtctatcactgatggacatttgggttggttccaagtctttgctattgtgaatagtgccgcaataaacatacgtgtgcatgtgtctttatagcagcatgatttataatcctttgggtatatacccagtaatgggatggccgggtcaaatggtatttctagttctagatccttgaggaatcgccacactgtcttccacaatggttgaactagtttacagtcccaccaacggtgtgaaagtgttcctgtttctccacatcctctccagcatctgttgtttcctgactttttaatgatcaccattctaactggagtgagatggtatctcattgtggttttgatttgcatttctctgatgaccagtgatgatgagcattttttcatgtgtctgttagctgcataaatgtcttcttttgagaagtgtctgttcctatccttggccgacttttcgatgaggttggtttttttcttgtaaatttgtttaagttctttgtagattctcgatattagccctttgtcagatgggtagattgcaaaaattttctcccattatgtaggttgcttgttcactctgatggtactttcttttgctgtgcagaagctctttcgtttaattagatcccatttgtcaattttggcttctgttgccattgcttttggtgttttcatcatgaagtccttgcccatgcctttgtcctgaatggtattgcctaggttttcttctagggttttatggttttaggtctaacatgtaagtctttaatccatcttgaattaattaatttttgtataaggtgtaaggaagggatccagtttcagctttctacatatggctagccagttttcccagcaccatttattaaatagggaatcctttccccatttcttgttttttgtcaggtttgtcaaagatcagatagttgtagatgtgtggtattatttctgaggcttccgttctgttccattggtctatatctctgttttggtaccagtaccatgctgttttggttacagtagccttagtttcctacatcttcttttagggataacagggagtattaagattcagttgttcacattgatgacttgcatgataatataccctttattggctatcttccctatttcacttcttctcaccctgttgatgtgtcctggaatcacatcccaaaactacttgagctcaaatttttatttctgggtttgctactgggagacccaaatcaagacagttggcttcagtactcaggtacttacaaggagatcatggatatcaattgaatcagaattccatgtcatagcttttcaaatttatatcacaataagttgaaaagatgttgattcttccttccacagtattttctgtttctgtgtgtcttacattctggtgtctcaaaacatggctgcaaccagggaaggaattgaaatttggagtaaatgtcctattttagtaggtctacatttaagacatggacctgaaattgagatcataaacaaaagtagatgtgagcataaagtagaaggtgaggttggagggggaaattgtttggatttactgtaaccaatggagctgcttagtctagtcaaggaatttcaatcatttctgtggagactagatgacttatgttatacaaggatatctctggaaaattcactgtacagttttactaaatctggctgataatatgttcactcaatgttatgatgtcaataatagaatggatattgcctttaaagacaattttaaagtaaatatctcacatattcctactcatttatcaagggctgtgtcattcatggcaatataagataattcttttcactttcaaaatcttccagatgcagaaactttccaatatttgctgtagatgaaagtgtacaatttcacaattcaatgggacaaaaagaattaggaaaaatatgtttcagagagtttatttggtatcatctacaagacctggtatgagacctggttggtgttgtatggaatgaaatatatcagtctgttctcacactgctaataaagacatacctgagactgggtaatttataaaggaaagtgatttaattgactcacagttcagcatggctggggaggcctcaggaaacttacaatcatggcagatggggaagcaaacaccttcttcttcacatggcagcaggaaggaggagaatgagcaaaagagggaaaagccccttataaaaccatcagacctcgtgagaactcactgtcacaagaacagcatgagggtaaccgcccgccgtgattcaattatctccacctgatccctcccaggacgtgtgggggttatgggaacaacagcttaagatgagcttttggtacagacacagccaaaccatatcatagagtttcgaatctgaaaaacaaaagaagctaatttagtttcagaaagctgagatttcatgaaccatttaaaaattcactttataatttttcatgcattttgaagcctttatcctttaaatggaaatggaatagaactattattcgtcatttctaaactgtgcattcatcaacaattttcagaagttaattccaacatgtcttcatcaactctatattacatgttagtacactacatctctattttcatgctataattttttactttttcctcacactttcatctcaccctctcaagatgtgttaatcccctttgctcttttccccatctcgtctctgttgcctttctccccccttcctttttttttaatttctgttctcttttacctgaaatctccctcttcatcttttgctaccaattatgttcttaattggttgaagtgagcaaggtaggaaattctccattttgattccattctctcacatggtttatctttaatatgttttaataaacagtttaacataaatcttacttccaatttaacatgtaaaatttagaaaattggtgaaaaatatgcctgctttttcacccccaaagaaccaagtttaaaaagttttgtgactttgaggcatccttttccctaaaagcaagcttaacagattcttagcattcgtctctgtgtgaaattgtggaaactttaaaaaaactatttgaagtaccaacaactcaaagataaattgtctgttttaaatgcaaggtgctaaaataaaactagaagattgacaatattattcatctttatcactgttctacttaaaatttgaaaattaatgttagaaatgtgagagggtgcatgaaaccttaatggttttatcatttcatctgagtatatatttgatttcttctttctgacattgaaactttaaaattcgccactatttttcagtaactcgttaaaatatggtccgttcttatatttgcaatactcctatactgaaaaccctacaacttcaccattatttaatttttatgttactatatttgtttcttaaaaagattataatattatgtattagttgtctattgctgcataacaattactacaaagataggggcttaaaactgtatctttagagtatcaggatacatatgggtcagaagtctaggcatagattatccatattctttgcttcggggtctctcacaaaggctgcacactaggtgttggccagggctagggtctcatttgaaagcttgccttggaaggacctgcttccaaactcacctgttgttggtaagtttcagttccatgtgggttattggactgtagtcttccttttcttgttggctgatggccacgtttagttccttcggtctctaacatggcaatttgcctcatcaaaatcagtgagagaaagtgggggaggggggaaagagacagagaaagagtgaaattgctagcaagacaaaagtcccaatcttatgtagcctaattggagaagtgatatccttttgtctttgacatattctgcttgtcagaagcaagtcaaaagtcttgaccactctcaaggggaggaaattattaaaggactcaaatactaggagacagagatcactgagtgccattttagagtcttcccaccacggattatttcccttcacctgctggcatttgaaaatgcagctaatactctgggattctccaaacctaatttttttgtataattagagaagtatttgtcataatctgttaagtgtagtaatatattaagaaattgaatttattccttcatatttcaaaaagtacatggggttgggggacagctatgttgtcataaactttaatacatacatgattggaatggattatgaaatatttttctctaagagatagtataaggctgcaaccactgaggctcccaaatacagatgattcatatgtatttagttttaatgcaaagcttctcatgctgatttaaactctcatattttcatatatggtgttttattttttatataatgaatgtctataaaattcctattattttttcaaaagtattgtggcaaatatttcctagtaaaatctaaagatatctttgacgtaatttttatgctctcatttatgttaagaactcaatattgaagtaatgttctttcttatttcctagtaactaaaatccttactatattcatgaagagctgtgcctctattaaaaagcttttattgcaaacagaaatgtcaaaatacagcaaaggtagagctatgtatgattcttcatctgtaatgtaattttaagtatacattttattgcataagcagagatttatacccacatttgctttcagtattcacagaagaattttcatatgtatttcttaaaataacaaaatggctgctttggtgtggggatagtatggtacagcatttattgtgaaaatgattcttatcttccatctttttcaaatggtgagttcagtatgtttaacattgctggttttataatattgcgaatatttttgagaggaagaaacaataagagactgataagaataattcatatttgctcaaagtttaatcagttttttatttgaacaaaaacttggacgaaatgtccaactttcctttgagatcagtgctctccaatgtggtaacaacagcctaccatatgagcatttgaaatatggctagtccccactgaaatgtgctgtaagtataaaacactcaccaaattacaaaacctaagtatgaaaaaaataaaatatctcattggtactttttatattgagtacaggttgaagtgacaacaatttggctatttaagttaaagaaaatataacattaaaattaatttgacctgttttttacttttgtaatgtgtagaaaattttaaattacatgtatcgctctcattataattttattggatgtcattgttctagataaacaatggcaatgttgagaggtgtcataatagggacaattgtctctgtgaagaagaaattatatgaaccctacaacatgtattagccgcagagttgcttagaattgacttactctgtcttgttgaaaataggttttcccttaaaatctctgcctgatgtagccaaccacgattcaatgagcaaacaaaaatcttaaaggggaaaaaatcattttttgagtctattttacacacccagtatcaaaaagaaaaatataaatccacaactaggattatacgggatgtaattcttggatttcttttggtcttataatgctttatacctaggagatgttcaacaaattattattgaatgattgtagtttaaccgtcagttacattttgcagcaatacatttattagtagcaaaatctgagtgtttactaattttcatcacctaatcagcaaattagtactgctcttatatcgctttgcctacgctctactcactggttcaatcagctaattttttcagaattttatggtttataaaccactatatgttgcacagtatttcctatacattagctcatttgagtcacagaagttataggaggtggatcttgtctttctttgttcagaaagagaaatccaggttcagcgaggttaactggccttgtttaagatcagcacgttgctaggtgacagaaggtgttcacttctcactgaactttgcatatcaaaagagatttaaagaattcactttggagagcgggagttatggggtgaatattttatcatgttgtccgtcttaataatcaccaatttgatactaaggctgctagtcatctctaacgaagagaagttactttgaagttggttgattgattgttgttgattgacagaagtattagttttcagaatgaactaattcattaaagaaataaaacattgggtttgttcattccataaataattgaacatttattatgtgtatgataccagcctaagcagatacctaaaaggaatggagattactatagttaataacaatgcattgtattcttgaaaattgccaagagattacattttaaacattctcaccataaaaaaatgataagaatgtggggtaatgcatatgttaattatctcaatttagccattccacagtgtatgcatatttcaaaacatgttgtacacaataaatacatacaatgttatgtgttaatttaaaaataaatacattagaaacggtaaaagtcactaggatcatggaaataaaaatgtttacatttatgtaaatattagtaatataatagagggcatatccaaaatatagtgtcatattaataagatgttgtatgattattatagactacaaaataataaaggaatagacagaatgtttctaaataaagaatagaaattacagtgaagcggaagagagagtaaccctaaacccttcataatcctccctttgcctcgtagtatagcttggaaagtaattatgtggaaagttgagattgcaacaaaggacggtagtacaggagttgcccaaggacagacaattattttctcaaataaactatagcagaagcaaaatggccttggaccacaaaagaaggccctcatgtagacattgttctattctgaagtagaatttgcagtactcaagagaagaggaaagattattataggtggagagactgtaaacaaaatattatggtaggattcctcctgaatagagcaaggtgattgtgtttgacattgaaaaggtatgtttgggcaagagtttgaaaacctttagccaccatgctaagagatcttaaatctttatctctgagtaagggcggtggttgtggttaatgatccttgagcacaactctgtcccattaaagacagtagattcaactgcttctagcattagtccatatcagggagtaaagtgatccgatacattattttcccccagtaaatggttcataaaggaaggccttggctctgccttgtatgtctacatgggagaatataccagaatgtctagaggagcatgggtagcgtaacctttccccatatgcacatacaacaaatactgataatccactcacaggggagggactcatttttaagaattaagttttattttagaagactcagtctgatggcaatgcaggggttgaattacagcaggtagagactggaggtctacaaactggtttgagatatatattttttccggtggcccagataataaggacttgaacagacttcttgctctgggaatgtaaaaggccaggctggatgtaagaggttaggaagttccaaactgtcccacattttcctttcttctgagccctccaaactgtaccagactctgcatgttacgcacttccaaagtcgcttccacattttcgggtgtcttttcagcagtgccccactctactggtaccaaattactgtattagtccattttcacactgcggataaagacatacccgagactgggcaatttacaaaagaaagaggtttaatggacttacggttccacttggctggggagacctcacaactatggcaccaggcaaggaggaacgagtcacatcttacgtggatgggcagcagtcaaagagagagcttttggagggaaactccgcttttcaaaaccatcagatctcatgagacttattcacaatcactagaacagcacaggaaagacctgcccccatgattaaattacctcccactgggtccctcccataacacatgggaattcaacatgagatttgggtggagacacagccaaaccgtatcagtgatgcaaaataaaagaagactgtggagtaaattacacatggagaaaaggaagaggaactaggaagtatagatactgtgagaattaactctctgttctacaaaagaagaaatgggcttaaagtggttccccccaaaactaaaatccaaaggcacataagtcataatgcacactgttacaccgagtccttccagctcttaacttacttgttttactgcactacacttgacttgagttttagacttagtaaatctgaggtaaatgcagattgagaatgagaacaaaatgttaaaaagagaagcagtctcattttcttactactaataggcattgcagtttgtgtgggctctagcagggatgtttgtaccactgggatctaagcatctatttctatattataaatagaaaaattaggttgagctatcgcgactccattacaaacttatggaattagattctctggtatggagcttggatatacatattaaaacaaaataaaacaaaaactcctacccaattgattctgctgtgtgctctagttaagactgttatggttaagaaaataaataatcgctgtatggaatgtatatcgtcctattttaaattaataaaaaaaattttgcaggccttcccaccttccaactcctagagacaacaaatccagatttgaaaatcagtcatattaaatagttgtatcgatatttaccctttgtttctacgttattattttcttcaattttcacacgtatttgttcatcagttggttatgatggacttcactttttttcagtcttacgaatgagatttctccctccaaaaatcaataggcacctgctgattttatttattccaacatgaagttgcagaaaatgaatatggccaaaaatggttaaaaaaaaaaaagcctgttcttcaaaagactagatcgtcagttgaagcagaaaattatattcagtgcactggatttatgcattgttttagccttctccaaccaatttagaaatgcattttcttataaaattgagattattacaaatcctgtgctaagcagctgaaataatgtgcctatgccaaggtcatatcttaaaagtttggaggagcacactgcaattgaatataagtttataaatgtattccacatacttttctgatatattttaataatttaatttttacattttacctatattgtcttcattttcactttacctttggtggtgtttcatacatattcattgtttggaagaaattaagcagacagtattctaaagtcaatactgagtctgctaatgaaaatggttaagttaattaactaaatggcaaccttcactgaacttattcaaagctatttcccctcatgatgtgttttcctgaagaaatgatgcataaaaactaaacccctgttattcgctattcttctgtatcagcctctaaattgtcactttacatgttacaacctgttgcatgatgattaattatgacaatttaatggcatgtaaagggtaaaaccctaaaggattactcaaaccatcattccttaagaaaagaaattgtaatgcctaggttatcttctagggtttttatggttttaggtctaacgtttaagtctttaatccatcttgaattgatttttgtataaggtgtaaggaagggatccagtttcagctttctacgtatggctagccaattttcccagcaccgtttattaaatagggaatcctttccccattgcttgtttttctcaggtttgtcaaagatcagatagttgtagatatgcggcgttacttctgagggctctgttctgttccattgatctatatctctgttttggtaccagtaccatgctgttttggttactgtagccttgtagtatagtttgaagtcaggtagtgtgatgcctccagctttgttcttttggctcaggattgacttggcgatgcgggctcttttttggttccatatgaactttaaagtagttttttccaattctgtgaagaaaggcattggtagcttgatggggatggcattgaatctgtaaattaccttgggcagtatgaccattttcacgatattgattcttcctacccatgagcatggaatgttcttccatttgtttgtatcctcttttatttccttgagcagtggtttgtagttctccttgaagaggtccttcacatcccttgtaagttggattcctaggcattttattctcttgaggcattaccattcaggacataggcatgggcaaggacttcatgtctaaaacaccaaaaccaatggcaacaaaagccaaaattgacaaatgggatctaattaaactaaggagcttctgcacagcaaaagaaactaccatcagagtgaacaggcaacctacaaaatgggagaaaattttcgcaacctactcatctgataaagggctaatatccagaatctacaatgaactccaacaaatttacaagaaaaaaacaaacaaccccatcaaaaagtgggcgaaggacatgaacagacacttctcaaaagaagacatttatgcagccaaaaaacacatgaaaaaatgctcaccatcactggccatcagagaaatgcaaatcaaaaccacaatgagataccatctcacaccagttagaatggcaatcattaaaaagtcaggaaacaacaggtgctggagaggatgtggagaaataggaacacttttacactgttggtgggactgtaaactagttcaaccattgtggaagtcggtgtggcgattcctcagggatctagaactagaaataccatttgacccagccatcccattactgggtatatacccaaaggactataaatcatgctgctataaagacacatgcacacgtatgtttattgcggcgctattcacaatagcaaagacttggaaccaacccaaatgtccaacaatgatagactggattaagaaaatgtggcacatatacaccatgcaatactatgcagccataaaaaaggatgagttcatgtcctttgtaggcacatgggtgaaattggaaatcatcgttctcagtaaactgtcgcaagaacaaaaaaccaaacaccgcatgttctcactcataggtgggaattgaacaatgagaacacatggacacaggaaggggaacatcacactctggggactgttgtggggtgggggaaggggggagggatagcattgggagatatacccaatgctagatgacaagttagtgggtgcagcgcgccagcatggcacatgtatacatatgtaactaacctgcacaatgtgcacatgtaccctaaaacttaaagtacaataataaaagaaaaaaaaaagaaaaaagcaaagaaattgtaaaatgttgttctatcagaaactcggctaattatttttaaattttagatcaaaaactcaactagttttaatgtactacttataagtcagataaaatcattttttatttttgttttctttttgtttttacatctgttagaaacgatggggtcttcaaagtaaaagaagagatttgcaatgcctataccaaattagttattttaggatactgaatgaaatggttttctatactcaataaaggtaaaagaataagcagaggtagatctggttttctgaaacttgaagcacattctaatttggcagttttctttaagtcaaagaatataacaggacaaatataaaattaggtatgaacatgattatagaaagaaaggaaatcataacaaattatacgtttttaaaaagatgacagataaccacatacatcacaaaaattgaaaaaaataagcagaatgttttcttaataatgaaccatctctgcaatactagaatatacagtgtctgaaataattttttctatctttctggatgcatcctctttcagcacctcttcatgtgagagcatcagaaaataatttactctttcccccagcattgttgattaaaatttgacttctatcattgatagtttagaaaagtttattttacattttcaacttattattggtgatgtcacataaattattacaatttattgtccaatttaggaagaccctgccaagtttctttcacatatgaactgtaaaatttaaaagatcattcaagttatcttgtacaataactaatacatatttttcttttagtcatactaaaccctgatgctaaggatcacccaaactttttcagggaaagaagtagcttgcaaataaatcaaggaccatttatccttactttttggaagaaatggaaaaggataaagtgttagtttaaatacactcaagaacagaatgtaagacaagaaattggaagcagagaagttcatcctcaaatgtaagagtgaaagaatagggttaatgaaacaggaaaggggaaatccaagaaaaattatgccgcgctttagagaatctcctaagcacagagatattggcaatgtgcagatgaaatagctgtcacaggtcagccatgtcagaggtgattccagccactaagtatctactgcagattagatatttggaaagcagaatgagctctgttcatgccattactggggcttgacttcttaatggtttcaagtccccctttgactctaatccttctaaagtcaactttgtataaactcttttcaaaagtgtttatccctgtagaataagttcaaaactccatgtcatggcacacaaaactcttcaaatcatattcagctggtattgttttcttccacattccagtcataactaggatcccaagaattagcaaataaaaatatgaaacatccagaattctaagcataactatgtcccaaatactacaacaaaaaatactgaaaagtatcgattgcttatacaaaatgtaaatggtatcctgtattttataaggcaaccctagtcataagatctctttcttcttcctcacacactgtcaagcttgagccaacagagtaccttttaatgggctgcgcagaatagctttcgatagtttacccattaattaacagaaaattcaaatgagatatcctctgtgaaatcatccttctctcctgcctcctgtctctccattctttctccaggagacagaggccctccagactccatgactttgtagtgtattgtgtctgtctttattagagtattcatcacttggtaattgaattctgtgtttaaatacattttttttcttccagaataagtgttcatagaagggagggatgatttacctagcatactgcctggcatataaaaggccctaaataatttttcttttaaccagtaaccaactaaccaattcaacagttttttaaatgagtgaaaccactttttaaatttttttttaaattcatgcttcacctgtaaaaatatatagatgaattgcaatctggaactctgagtaatttatataaaagtgatgaaaaagaccatggcttcagatttgttgttttaattccagcttcagttcatacaaacattacaaagtcgcagtatctactgtgtaaaaagtttcatcccaatgaagaaattaaaatgtctgtctaatagagatgctctaatggacagcgatgtgtagacttcagaagaatctcctcacacagccttggaggcataagttgggaacagagcaagttctgtgtttgcctttcaaaggaatgttcctttccctttcattgacaaatattataaagatgccccaaaacttctgtgagtttcccccgggacgtaaggtcctctgcattttcctaacttgtttctcaaagcggtggttcccaaggcctgagaatagctgtgtctcagctctctcctggaaaccagagcctaaaatgttgccacatcatcgggaatgtagctgcatacttagccagagccaagagatgagccccactcgcaaagcccatgggctggacaaaattgttagccatttggtgtaggtcattgcactaggtccattacacaggttatctggcaggagtcccggctttggaggaaagacgtttaaatcctgtaaataaatggctggaacaccatggcagttgattgtgttaagccctcatccaaaattgctttgttaggttctattctattgctcattatcttgctgtgaagaaaattaagcttacatctgcttagggtgacagggtatcctgttgtcacaggattttccacattttaggcctatgtcacaagctcccaataaaccctcagagaagatcttttgtgttcacaggcatccaggtgtcaggcagacacagtctttgtcttcttgaagctcagtgacacgttcagggctgtgtatactcctccattccctgccagagacaaaatgtttgtggaacagtcaagctagaagggacctcagaattaatctgatcaaatgtctgcatttttcagttccaaggatactcagggaaggccctcggattctataagtagcggtagaggtggtattagaagtcaggttgcctgacttccaaacctctgttagttactgtcccttcccctgcatgcagcactagtgtaatccctcaactctcacttccctttttcgccacatgcctctctctctttccttcccttgattaccctgcctatccctcctacaagggaaactaccaccaggcatcctcatctgagacccgggaatggaggccaggtcttttccctccctccctccctttcccctttttttgtgtgacagtaacattattcaagtacagctcttccttttttcagtaccttccccctcagaccagaagttaatgaaaaatagggttgcgtgatatgcagcctgggggccaaaaatgtaggacaagcagtgtgcttcagacaaaactgtagggttctggtttcatgcacaaccttggaggacggtggctagaggccctagtatgagagatcaattaaacatggaggccagaaattaaccacatgggattaacatacgtaaggttgcttcttttcaatgagtctaggaaacacactggggacaccttgttcaagacaagctactatttgatgctccttcatacgcttgcttaaaatatttgttcagcatttatttagtgggggcaagaaaaattgatgttatgttaataagaaaacctctttacctcttaccttttattaaaataatcaacttagaagatatactaaaactcacatgacttttgacatctatggatgatctttcatttaatatttttctgctattcctactatagaataaaagctgctattgcattattacagagcgtaatgtgagccacatatgttattttaatcttaatggccacattaaaatagtaaaaataaacaggtgaaatttatttggattatatgttttatttaacccagtgtatctaaaattgtatcattttgacgttgcaatcagtgcaaaaatacagtcatgctatgtgtaatgaggttttggtccatgataaactatatatacactggtgatctaataggattataatacagtaggtttaccatacctttttctatgtttaggtatgtttagatgcacgagtacttgccactatgttagaatttcctgtagtattcagtacagtcacgtgctgcacaaatttgcagcccaggagcattaggctatatcatgtagcctaggtgtgtagtaggctatatgtaccacctaggtttgtgtaggtacacactatgatgtttgcataaggataaaatcacctaatgacacatctctcagaatgtattcctgtcattaagtgatgcatggatgaattaaaatattttggattctttttttttttcagtactatgccttcggaatccaatatgtattttacagcatatgtctattccaaataggcatattctgggctgggtgctcaatagctacatgtggttagtggctaccatattaaccggtgaagttctatgcccatcaaggctacacgtaatttacagggtataatagtattttaaaaattaatttttttctggcttttatgttgacatatcgtttccattttttaaatttttgttttattttctttcactgctttggaaacgcacaacttcttggaatgcaaattaaaagatatcaaataatgatgtagataatttgttattgctaaatgtctaccacttgaaatattcaagtttcaaatttcagctaactgcgattgcaagcttcagctagctggtcccagatggatggcccagctaaatcagacatttgtacatactggctacaaagtgtcccaaaaacagaccaggagggtcgtggatttaaaaaaatttccaccaaaggatgctgtcttgtccattttccaatttgggtaaattaatggatactgcatttaaaagtttttttatttctcgtacattgaagccctgtactgcactcaccaactcacccgttaaagcggctctgaaatacaggcaggaccaagacttagatggactggaggttgggccacaactccttgaacacctagagcagaggtcagcaaactttctataacggtccagatggtaaatgttttaggctttgcaggccaataggtctctgccacgactacttaacaccgctattgtggatcaaaagcagccctaatacgtaactacacataaacgaatgggcatggctgtgtcccgtgacaatttacttggggacacaaatttgaatttcatataatattcatgtctcacccatttattaattattttcagtttcttcaaatgttaaaacaattgttagttctcaaactgtacaaagacatatggtggctgaatgtgacccataagccatagtttgctgccctctgcccaagtctcctgttgaaatggggttatggcaacaatcctcgcagaatataaaactattttggcacctgacttttgccctgatttttttattgtttccagagaaatcaagtatttttctttttcaaatttatatccatattctctttttttctttgctctcttctcttctggccagcaggaagagaccaacccatctttgaattgtattcactttcctcataccgtcacacagctagtaaagctacaacttcacatatgccaatgccaactcttcccgatgttgtgttcaaaacctttctaagcatcaccattcccaggagtagcaattctatatgatattattattttacttgttggtaaggttaaaagttccagggatactgattttcttctttgttagccatgtttcattgagtggataagcaatatgcatttgcttcatagtataaataacaataatgcatcaaattgcaacaatatgaatattacacatagaaaagataaatgtgagttatgtaggtcatgccatttgatagaaaattttttttatatttatatgtttaaacatgacaataaaatgattccattcagatgaaggcaaaggaataggatttcttttcagtgtggtggttttctatttttgttttgttttgttttgttttttagagaatgagttttggagaaaaacaagctttctagacagaaaatattgaaattaaaaccagcaattcatggtcatattattgaaactatcaaattggtatatatatttgaacactactgattattttctaaaatgttacgctttcaaaaaatcatgaagattggcaagttttttagatgcataagcaaatagtgtagtacggcttgtaacactgttcaagataacttttttataatgagtatggtctttctctgccctgtctaatacaatgtgggttttgagcattggaaatgtggtaagtgcaactaaggaactgatatttaaattgtatttaagtttaatacatttaaatttaaagttacattttgataaattgctttgtttttcttttttctttctttctttcttcttctttttttttttgttttgttttttttgaaacaacaatctcactatgttgcctcccaggctggtatccaactcctgggctcaagcagtcctccttcctcggcctcccaaagtgctaggattataggcaggcaccaccatccccagctaaattgtttcttaaatgaaacttctgaatttgaggatacgtgattatgtggtgtagttttccctttctttccccccctgaaatccatattctgaagtacagtgatttatataaaagtaaaaagaaggagactgttttttttttttaaattctattaagaaaccaaattttaacagacacctcagggcctaaataaatatcaagttattgttatttgttatggttcttgttgcttgggtaaaactgtacagatcatgacttagttttccttgaatttttatcaaacaaatgaacaaaatgagcaaacaaaaatattaaaaatgatatttcctacgaatccaagggacatttttctgtatcagccaggctgatgctaaggtccttcaagcaaataagatcaaagatttctgattggagagtgtgggaataaagtagcccttgtttagtgctactttgtagagcctttgtttagagtacggctgggagggagggagagagggagaaaaatacggggttaatttgtaacaacacattctgtggtgtgcgtgtgtgtgtgtgtgtgtgtgtgtgtgtgtgtgtgagagagagagagagagagagagagagacagagagagagattaaattacatttaacttctttaaattttattgtcctcagggtttaaacagtatgtgaccaaaatcacattatttagtgaagagtttgtgggtaggtggatagttagatgggtataaatccctataaaatccattttagaactattgaggtttgagcaaatcaatgtcacctattcacttcatttgtctaatgcctccaggagccattaaagggcttgttacctaactttagggtaggtttagatcaaggtgaacagtcagaaaatattatccatgtactcacgtatattattaagtattctttgaccatggagttagatgcttatactgcaaacaaataaattaatgaataacagtgctgctcatgaacaccaaagtttactgaaaagtcaatatggttttagtgtggtaataagggcagagttctccaaggactgccaacctatttattgtacatcaaattttactgactttgaaatcttgctagaaatgttcatttacctcgtaatgtattatatgtttgaggtcttgagaaaaataacaaaatccatgtgtggtaatgaagtggttatgcaataaaactaacatacactgtgatttgacacaggggacttcactgttatcagatacttaaaactggaaacaatgtaggaaatatagatgtataagcatcgtaagtaaaatccacatgctttaaaaaggaaatccacttacttttaaagtaatattccgagagctatgccactgggggctgaatgtcataaaaatgatttgtaattagtcacttttacattgtatatggatttatagttttaaaatatctggtggcatataaccacaatgtatttttcagtcatatattcatcattattttattaaatttccagagggaaagaaaataaatgacctcctagtgagggatattttaccacgagaccagttgtaaaaataatcgagttttgtgcctgggaagatatctttgctaagtctagttctccagtgacattaatttattgttgttaagaaatgtgtgaggcaaaatgaactctccaaatatttcatactacgtgcattttatccaaaagaagataatggtttacatgaattatttaattggtattactaatttgggggaggtgatttttggttgggggcaacagaatatttgcctaaaatgcattcagagtgcgctgttatttagctattttcaaggtagagggatattggcattggagacttacacgtagccatacaatggccaacttcagtcaactacagaagcaatacagggcagcggctggaacaaaatagctactaggtaaatattgattgaattaattacacggatattaccactagtcctgcaattaattaatacctagccctgtctccagccccagaatccatgacatcaagctaactaacagaaaacatatcaagaattttattccttagtcctcttgactgaccctcaagagggtctaccctcttctactctgtattcctcacatcaaatttcactagtccagccgccaagtaacacctgttctgactgtgctagtgaacttggatattcacacatagcctaaaatgggaaacagagttggaaatgtcatgtataaggacataagcgttttcaaagtgtacaagaacataagcgtttttaggagatttaccttctcttttctgttttattagcgaatgattgattgttttgtatgattgttcatttaacaaatgctatatcatgtaagaaaagttactaacggtatataaagatgtaaaattcaattgtggctgtgtgtatgtgtgagtattctagcttttggggagagacaagagaagaaagaagacataagttggaagagaacagtaaaataaagaaaaaagtaataactgacggtgtctaatgaagtagcccaggtaattaatgctagagtttattagatagaatcattatttccttccagagggattaagcaatcttctctgaggaggtggaacttttattacccaaaacatgaaggattgggaagagttttatatgtgtcgataaggaaaagagatattttattgagggaaaagaagacattttaatggcagagtacacaatgtcagaggaacagaccaaaagaagtgctttgttattaggaagatttgaagaatggaagatagcgtcagattgttaagaaccattttttagataaaggcaggctaaagaagttggaggctattggaaatcagtcacacaattttaagcaagagaatcaatgagtggcagttttgaaaactgaatttgatagtggcaaggaaaatagggctctatcatcccacttactttcaaagttatgaagaaattgtagtaagctccagtcagtacctaaaggaatttattttgtgaaattgtgtaaacaaaaagcaaaccttcttttgcactcatatagtatattttctcaaagtcatatagctaaagggaatgagaggtaaaatagtacagtggttaacaggataggcttcaaagcctaacttcttgggttcaaatcctagcttggttaccatttcacagctatctgaccttgtacaagtcacatgcgtacactgggaacaataatactacctgtattatagagttgttattagatgttgttgatagatatgttgggcacattttaggcactacatacataaacctctttctatagaagtatacatgtgtacctatatttaaaataatgattttcttttttaaaagaagcacatattcattgcagaaaatttttttgaaattttaaaagtaaaatctctggtctaagtgcactaaaatgttttagactttagatatgaactacaaaaacctacctcatcgacacccaaccccactcccagagatatttcattttatttgcttgctatcagtaatgagaagacccaattcaccacacaatttctgttgtatgagactattgtattgcagtgcaagatagtgttttaaatctttgttaaatcaataggtgcaatattacacctccctgtttgaattttcctagtgaagtcaaacaattttaataggcctatacataggtcagttatagttctttcctaaatggtctattcctcattatcctttttaattgagtatttgtctttttttctactgatttgtgagaatgtttttatcttaagagtgtcaaaaagatgaattgtttttgcctttttctttggcttgtttgattttttatgtaaagaaattttatactgctatgaatgtaagtcattactttatggcttttaaattaaaattataagaatagcctcccatattttcattacttttatagttcaatttttttacatgtaacatttcattcatctggtatttagttaggaattgtgtgagataggattttaaaattaagttaaaattcaatcaagtctttattttttaagtacagaagtttccgaattcagcatttacattaaattttttgaaaataatgctaaaatatcatgtaaattattacttattggaattgaaaattccctattattatttttaatctttataacaacttatgttatctatgcttctattataaaataaatgacaagccaaccaaaatagagaagatgcttatcacaattatatcatgataatttaaacatgattttggattaatcataatccaaaaatgcatttgataagcattctaactgttcttctagtccccataaaattaacaaatggcaaacagtaatgttttaattttcaaaatattcatattaatattcattttcaaaatatgtttacttgcatgcatttcatttatattatttcttattgaagttgacttctcaatgtatattgctttaatgatactaagtattaagggtatagattgtactcacacaaataactattgaaaagcataagtttaaatagatccatttatcaaatgatgtctttttttttcttttttttttttttttttttttttttgtgagacggagtctcgctctgtcgcccaggcaggagtgcagtggcgcgatctcggctcactgcaaactccacctcctaagttcacaccattctcctgcctcagcctccagagtagctgggactacaggtgcccaccaccatgcccggctaattttttgtatttttagtagagacggggtttcaccgtgttagccaggatggtctcgatctcctgaccttatgatccgcccgcctcggcctccccaaagtgctgggattacaggcgtgagccaccgcgcccggcccagatgatgtcaattttgaaagatactggaaagtatgttttgggagggaagagggaaggaaagagtagaatatgaagtcagtaaaacctggatatttagtgccatctttgttacttactagtaaccttatgaatattatttatattgttgatccttaatatcctcacttgataattttagaaaatgttatgtacttcataggatcatgggtagaataagaaagtgaatataagtaaaatccatcatgaagtacctgaaatatgttgtaaacctaagttataatagtaattttattgttgctaatatttcagaggaatagccaccaaaccagtactacttattatttatttctatttaacatataaaacatataatattctttctgagtggtaactttgaaaagggacaaaaatattaaaaattacattaaaatcatgtataatttataatactcctttcaaggttactaaagtgtgcatgtatttctaatcattcacaaatatgaaaatctatgtgtaaatttttaaattttctaaaaaattgacaaataaaaattgtattattgtcatggtgtacaatgtgatattgtgaaatatcacatattgtgaaataaacattgcggaatgactaaatcaagctatagaacatattcattaccttacatacttattattttttgtggtaagaacacttaaaatctacttttagtaatttccaagtatacgttattgttactaacagtagtcaccctgagttacaacagataactaggatttattcctcctgtcaaactgaaattgtgtatcttttcatcaatatctcccaaatcaccccacccccaggatctaataaccaccatttttctctgtttctctgagtttgacatttttagatttcacatataagtgaaatcatacagtatttgcctttctttgcctagcttatttcacttgacatcatgtcttccagttcaatccgtgttgttgcaaatgacaggatttctttctttcctaaggctgaatagagttccattgtgtttatataccgcaatttctttaaccgttcatttattgatggacatttaggttgattccatatcttggctattgcaaatagtgccgcagtaaacatgagagggcagatatctcttcaaaatactgatttcagttcttttggatatatgcccagagataagattgctaaatcatatggtagttctatttttaatgttttgtggatcttccatactgttttccacaataattatactaatttacattcccatcaacattgtacaagggttctcttttctccacattctggccaacacttttcttttgtctttttgataatagtcattctaacaggtataagatgatatcttattttggctttgatttgcatttccctgctgattagtgaggttgatcatttttttttttcatatgcttgttagccatttgtatgtttgctttagagaaatatctattcatgtcctttgctgtgtgtcgatactgatatgtaaaatatgcatacaaaatcaaaaccataatttatttttaatatatttttaatatgtcattaatatttttcagtgtaataggatgtttttcataatatttactttaatggacgcaacatatttcattatgtaaaagcagtttattctatttggggagatttcgtttcactttttcgccagagtgacataattgaacattcttgtcataggtctctgtgtttatctctgatattcccctaggaaaattcatagaagtagcattttggagttgaagggaatgagtaatcttaaggcttttaaagtagttttatcaaattttctaaactgaagtataaagacacatagaaaagtacacaaatcataagaatagaaattcagggatttttaaaaaaaacttagtgtatccatgctactaccaccaagttcaagaattagaacattacctcaggagcccctctcatgttccctcccagttatgagcctctcccctgccaccaccctctcccaaagataagcactcttttgacttctaacacctagattagttttgactttgaaattactataaacagaatcatccagtatatgcccttgtatttgacatgtcctgctcaacattatttttgtgatattattctatgctattgcctgtgccatagttagtttagtttttctatgtatggtattctattgtgtgaatatgccacagtttatccattctgctaatcaatggacattgggctgtgtctattatggggctattaggaaaaatgctggtgtgatgttcctgtcctttgctgcatatatgtatatatttatttttaatatacgtggaagtacaatggctaggtcataagatgtgtacatttggctttggaatcaccaaaaaacagtttttcagtgtggtcatttcagttcattttcaccagcagtatataagacttctagttgatccacatattcatcaagagtatgtattttcaacctttatccttttaaccatttaggtgaatgtgaaatggtatttcattgtgttttaatttgcaatcacctgacgattagtgccatttttatatcctcttatgtgaagtcattatgcaaatcttttgcccattaaaaataatagttgtctttttcttactgatgtagaagttatttggatacaagtcctttgtcagatctatgcattgcgaatatctttttccaacctaaactttgctttatttttttctcttaacaatctttcctgataaatggagtttgatttatcagtcttttcctttatggctaatgctttttatgtcttgtttaaaaaataatacattaacctaaaattgttgagatttttttctatattttcttttgaaaactttatttttttgccttttacattgaggtctgcaaacaatctagaatttatgttttgtgtatgatgtggagagtcaaggttcatgtttttcaaatgactaatcagttaacttggtgctatttactgaaaagatcatccttttccaacttaagtgacaccatcgtataaattaggaaacgctatatagatgatttgttctcacttcaatcccacacaggcttaattataataaatattcatgtctggtggcaaacattcttaaacttcgtcgttcttcaaagttgccttggatattcttagccctttgcacttacatataaatcttaggattggcatgtcaatttctactaagaaatggttgctgcaattttgattgagattgcattgaatttatagattatttgaagagagggcagatatctttacagtattggactttctaattcatgaagaaggtagtcctctatttgtttacattttcttcactgtctcagtagtgtttgtagtttccagggtagaagcttaacttttcggtctgaattaccaaattactagcaacatatatagtcatgcatttcttaacaaatgagatatgttctgaaaaatgtgtcattaggtgattttgttgttgtataatcatagagtgtacttacacaaagatagatggtatagcctactgcacatccaggctatatggtacagcatattgctcctaggctacaaacctgtactgcatgtgactttactgaatactgtagtcaattgtcacacaacaatatttgtgtatctagacacagaaaatgtaccgtaaaaatacagtatacaaatgataaaaaatagtacagctgcatacggtatttaccatgaatggagcttgcaggactcaaagttgctctgggtgagtcggtgagtgagtggtagtggtgagcaaatgtgaaatctaagacattattgtacggtaccatacagtttacaaacactgtatagttaggctgcactaaatttatgaggacacatttttatcttttttttttttttttgtatttttagtagagatggggtttcaccgtgttagccaggatggtcccgatctcctgaccttgtgatccacccgcctcggcctcccaaagtgctgggattacaggcgtgagccaccgcgcctggcccatttattttcattaatgataagttaaccttagcttatagtaacttttttactttataaactttttttttaagtttttgactctgtaataacacttagcttaaaacatgaacacgttgaacacccgtacaaaaatattttatatccttattgtagcagctttcttatttttaatatttttgctgtttaagcttttctgttaaaaagtaaaacacaaacacgcacatgagcctaggcctacatgggtcaggatcatcaatatcactgtcttccacttccacatgctgtcccccactggaaggtcttcatgggcaatgaaacattcatgaaactatcatctcataggataacaatgccttcttttgaactaattaagaatatagtaaatacataaaccaataacagttgtttattatcattatcaagtattgcatactgtacatacttgtctgtgctgtatttttatataactggcagtgcagtaggtttgcttacaccagcatcaccacaaacgtgagagtaattcattgcactgtgacatcactaggtaataggaatttttcagctccattgtaatctcataggatcacagtcagtctgttgactgaaatgtggtgaatgactgtataatagggctccaaggaagatcataaaattgcttgttttccagaactttgacaaagaccttttacagaaactaatataatagataaataatagtataacattgctgttttcctttgcatttcattgattactaactgtctggattttttcttgtttattggctgtttacatttttgtcaatttctttttatgttctttatccagttttccagtagatttttcctttttttactcattaaaagatttttttatatgctaaaattattaccctgtgtctgatatatgctgcaaatattcccagttgtcatttgttttaattttgattagtggctttaatttataagtgaatacgcatattatattcaatctttttatattctttttttgcttctaaaaggcttccccacgccaatattttattccagttcttcttactatttttatgcttaacactttaatttttctaaaatgttttgtgttatgaaatccatcttaatatgtttatttctaaaacagacacttttgcttatcttaatattaaaacatatacatttgaaattaacattcagagattgaaagaataaggaaagtaatcttgtgtgaaattaggtcaagatgtgcttagatactaaattaacacataagggaattgaatgtgtttgttttctttcaccacagggaacatgttatatgaagagcatggttttataatacataaaaggattattagaaaaatgatgtattttaccggtcaggtgtttgtgtctatactttgatgtgaatgcaaaatagtaaatataaatgtaaattaatttaaaacacatagaatctgatacaaaccttaatctttttccacgttatacattactcacacctgttatatttttccgtgaagtatttggaatactctcgattcctggaaactgttttaaagtgcagaagagcacaaaaaaaatatgtgttaaaagttcttgatttccacccaaccattaagtgatattgccaaagaaaactcttcagagcatttttcactgatggctttagatatgttataccagaataataatgattcattattaaaatatgcaaagtgtaatttctcaacaacattttgtggtaggaagatgagctggtacagtagttttccttattaaataattttttacaaaagtaattgacatggtttggctgtgtccccacccaaatctcaccttgaattatggtaatccccacatgtcaagggtggagccaggtgcagataattgaatcatggaagaggatcccccatactgttctcctgataatcagtaagtttcacaagatctgatagttttataaatgtgagttcccctgagcaagctctcttccctgctgccatgtagaatgtgtttttgcttctcctttgccttctgccatgattgtgaggcccccccccgccatgtagaatggtgagtccattaaacctctttcctttataaatcacccagtctcagatatgtctttgttaacagtgtgagagcagactaatacagtaatgcatttacattgttcaaaatataaaaggtacagtaaaaaatatctcaccctacccatcatctgctctaccctcactgcacattaaccttaattctagaaacaaatctacaaaataaattcctgggaataaaatttccaggtcaaagtttacatgctttttatagatatggccaaactgccttccacaagaggtacacaaatgtatacttcccaccagccacgtagaagagtctgcattttcccacagccttggcagcatagtgtacctgcagacttgaatttttgccagtgcaatagatgaagctctaattttcatttctctcattattaccaaggctaagcttctgttcatgcttttaaaatcctttgtattttcttttctgtgaactgtccttatcttttgtccaattttcttttgggttgttggcctttttcttattactttgcagaaggtctttcatgtgttaggaaaattagtcccttagacatgagtcacaagcatttatttttcataattgttcatttgtttttgattttgcctatggctcttttggtcgtgcagaagcttttgattttttatatagtccagtttactgatatttttgtctgttaattaaagttatttaacttgaggatacaatttacatttttttgtggttgactactatagacatatactgcttcttacattgaaaaaataataatcctgaatttggaaattgtttttaacaaacttttggtgaaggtccatcatatttaggaacagagcttgtttgacccagaaatcaaaggtcagtgagaaggagcaatgtaaatagaaagttaaatagcatgaggtaaatgttatgatggtgggaaagacaagatctgagaggataaacctaaagcaacatcataattaagctgaaaatttcgtctcatgataagctatcatttcattattccagatattagtcaaatctgacccattacactgttttctgtcaggaattgttttacctctattacaaggaagggatagtatgggaggatgataaggaaaccagcagtcttagttaaatgttatacagatttctgtgcttatatatgaagcctaaatgaaacgtgaacaatttcatgatcagataaaaaggagttcatcgctcagttttagagattttaggaaaatatgatggctattatctcagtagcttcagagtctagaggcatttagatgttgttagttgaagctgtaaaacgctttttacatctacttgtgagtagaaaatgatccaataaaaataaaatgtttagttacctcctttaaaatgcttgaaaaataagttgaggacatcattagatcatgtattacagacgtaggagtatatttgtaacatcacctacatcacacatacctgtgtgcgcgcgtgcgtgcacacacacacacacacacacacacacaagagttcagcaccacaggtgtagttatggatgtgaactcacaaaacacaaatcaagcaaagagaacaatatctcaattcatgattcatggacattctgtgctatctgaaacacaatgcttcttttgcccaactctcacccacacagggaaaggctgccaggaatgagaggcaagaagtgtgcaggtcaccttcaacaggagccaccacctgtatttcccatcagtcttttacaccattgtagtcacgtggatccaaggactgtattccaactgacagctcctgcgatgaggtgcagttccacacgacaaagccaggcccaacatttcccattcatcttaaagttagtgtttccaaggaaacagtgctgtgggagcctagggtcagtcccagactgacctgcaacagcccaggctggatgttaatcctttgcttatacagtctcatgaatttttcacaacatatatacatgcatttacaagacgtttcactgtacatattgtttacgtatacaatcttgtttaaaattcatttttctgtacattaattgatttttttctcgacaactttctctttttcatctcctaactcttgcatccaattaaacaatgtactgttcattagtgacttattttaaaagtatctaaaacaattgttccaaagcatgtgacattgtttatgtgacacactggtatattatctagtttatttttaaaatcttctctattattattcataatatattattatggaacagatgtatattataaaattttattcatattgcagtgtaatattttgtattacagtggtattgttaatagtctcgtaaagagctatcattacaagtttaaattctttattctgggatgccagttttaactcttgatattctgaagaaaatagctttactcttgtttattctggctctgtttttttgttttgttttgttttgttttttgttttttttgttttttttttgtagagatgggagtgttgctatgttgtccaggctggcctcgaactcctgggctcaagcaatcctcctgcctcagcctcccaaagtgctgggattacaggcaagagctacagtgctcagcctatcctggctctttatttacatgtaagcttgagcaataatcactgctacttaataactttattgtcattcattatcatgcagagtattgctctaaggtatgttcagggatgacgttactgagtcctaacagtaatcctatgaagcaggtgctatcattgtccccaatctacagaggaggcattgagagttagagaaaacttggctaaaatgttaggcaagaactagaaccagaattgaaatccaagtggcctaactctagacctcacaatgcttaataccatgtcatgctgcttcctaacctatttaatgtttttttcaaccccaacgtcatcacccatgtgtgatagtgggatcataataatatctatgtcgtagcattgttggatggattaaggaagtctacaaatgtgaaacttccaaggatgatggttggcatatactgatctcttaataaaaataacctataatcattctgttacagtctactctaatccaaatgttctttttacttctcatctcaaccacctgcttctgtttactaggactcacaaactatagctcacaaaaacgcataacttaccaattttccttgtacatgaagggacttccttttacaatcttccatgacataaaagaaagctagaagcaagtatagtagaagaaatgattgctatacaaacaaaattatagttggtttggttttaattttaggatgcgcattgaataaaaatcactcatttgggatttagaagacctgtgttatatatctggtgctaatgctgaataacttggcttattcatttttataactgcaaaggaagcgcgtatggcatataatacacaacacaccagtatatttagtaactgagtgaataaatgaaagatgtatttctttactttatcagttgcagttggctatgcctttgtgtaaggtgtgtgttttgaaattccaaaaaggtattagtttctttaaagcaaagaatttttgtagcaggttaatgaataattttgaatacattggttaaatcccaacatgtaatatatgtaaataatcaatattatgctgctaaaataacacaaatcagtaagattctgtaatatttcatgataaataacttttgaaaatatatttttaaacattttggcttatgccttgagaattatttacctttttaaaatgtattttcctttcaggtttccagagctttacctgagaaacaaggagaaattgaagctcaaataaaagaccttgggcagcttgaaaaaaagcttgaagaccttgaagagcagttaaatcatctgctgctgtggttatctcctattaggaatcagttggaaatttataaccaaccaaaccaagaaggaccatttgacgttaaggtagggaactttttgctttaaatatttttgtcttttttaagaaaaatggcaatatcactgaattttctcatttggtatcattattaaagacaaaatattacttgttaaagtgtggtaaggaagactttattcaggataaccacaataggcacagggaccactgcaatggagtattacaggaggttggatagagagagattgggctcaactctaaatacagcacagtggaagtaggaatttatagccaaggagcagtgtaggagtcagtagatggaaaattattaagaggaaacatcaggggtaagtgggattctggctaaaccaacctcacaggattcttgctgaagataggccagggttatcttatcagacaacccttggggaatggtggagaatactgagggtgatcaggtaccaaggataaagggttcttgtaaaactgacaggcttctttgctgaacctggattttacaggggagtgcaaagatgagcccaggcgaaggttcagaagcctgactaaagtttagtcaagcagggaatctttgtcatcatcatcattgttgtcataatgataataattattattattttactagaatatgttgctttttcctcagcatttactagaaataaggtcttcattaaacttatgttactagaatgcctgcatcatatttgttactgtgattcattttctatccctgttttaattgtgcttaatacatattcatagattccttatccaaaattgaagttgtttatgagattaggttcctaaaatataatgtctgggctcttttgtagacattgtaaagccctctcagactgactacactttacctttctatcttctcattctgccagcaatctccccgtatagtctggccacatcaaattacctggtacctttccatccatgtaatttcatgtcatacctgtgatcttggttttctctcttctttaaatgacttctttcagtttattttgatataatgaattttcttccattctttaagaatgaattcaaagtcattgcgtcttccaagttttcttccgtaccccaagtagagttagaatccctgttaggatttcttataaacctttttattcatctcccattgttcatatgttgatttacacttaaattttatacacctgagtatttcattacacatctgcactgttctttgagtgcagagggcattctcttatttatctctgcttctccactcatatcatacacactcagcctaggatccagtaaatgatgcttacttgtgagtgtttttaagtcaatgaataaagacagtaccaagacacccagaatacgaatgagatactgcaggtaagcgtaaggcttcagacaatcctgccaattgaacaccactatctccttcttctagtgtccttgtaaatgctgattgatcttcttttctccctttcaaggaatctattccaaagattctttcaatatgctgccccgttttgcgtctccttatttgccaaaatctttaagtagccaatcaaataaaccgaatcgttgaaattacaatctattaatgaatgtattgttgggcaacttcagagtaaaaaggataagtaacatttttgagtagttttttcttttatttaattgactttaattgttaaatttatttactgtccagtattgtaaaaacctaacattttaatctccatttagctgttgttttgctggaactgagagcaaagggaaaaggaagtttgagaatattctagtgaagaggaagtaaaagtttcgggaagatgggcatgagtaacaaggagatagagggaagtttgctacaactaaaatgagttagattagcaaaatgttctcgactatgtttaccttacttcctcctgacacttatgtctaccattctgatagctactcctcaagagcagatggcactgtggaagtcacaagtagacatcatttcactagcacaaaactcagcctgctcagccagtggcacagtcttgggttcagtctgatgattaaatttacgagacataataggctttacccagtaacaaatttagttagctttaagaaattatacaggatgggtaacaacagcctgcacattaaaggcacagtggaagtcttgataccaagacgtggcttctgatgtcccatcaccctgaattttagtcatacatgatcacaaggggcaagactgggtgcgtacaaaacacatcatcgtctcagggaagccatcagttctaggatcctgaccatttctccacttagctagtacatattgtactcagaggtgtttgactagctcctattcaccagtacaattacatctcatgaatactgatttttcactgctcaataaacaaccccaacaagaaagtacagttacttggcccaatacacaataaccttagccaaattctcaattatcttatatccagtatattcttaaaaagtaactggcgtaatattgcgaagaggaaaggtcataaagtctttcctcccaaccagaaatagctttttgtagctcacggtaaaagcacattctactcttttaaatgcaatctttggttaaaatgtgcctctttattataatagtttaaaaaatactcaatgctagctatctctcttcctggaacacatttaagaaaagatttttttttgaatcccttggtacaaatagatcctgtttactcaatcaaaatgacttttgtcccagtctgtgccccccggaatggttttcaaataatgaaaacctgcattgtgtcttcgattgtctatggcccatagggctctgccaaatgggtccctgcagtttgaagtgaaagccatactcggctgtgttaatcacttttctttatcaaagctacaagtcaccactcactgctgtgtgtagtttctgagagtcatgatatttgcctcctgcagcttgttttaaatcactgaggggagagggagctgcttttttcctggcagaaaactccttggcttcagtcctctgagcacattccgagtttcttatctctggagtgcagacttcaaaaatactcttttagcctttttcttctgcttgtggctgtgttcaaggtggggggaggggaaacataaaatcatagatttgatgacttgagagtttctcccaaaaattctcaaacccccagcttataattaggaaatggtgacctgtgtgaataataatttaccttgttttttatccctctttgtctagcttccattcctttcactaataaatgatttattaagattgcacagtttttctgatttaagatataggatattagtccttacagcctgctgtattcctctgcttaaaggaattaaactatttttccattaaagaaagatgggacactagactttgctttacttagtttcaaactactgaacaccaaaaataaaatttttaaggagttttgagcacatgcccttttttttaacacaaggtaaaaaaaaaaaaacacctttactaaaatcttaagaaagagttaatgcaaaggaagtagatatacgaacagccacgcccctagctccaaatcctaaatgtaaagaaacttgccttgtctggccatggtggccatagctgcctcggaaacaaagggtctgaggccttgccattcgggtagtttgttttctctagtcaaactctgagcacacctgttagaaaaatatgtaataccctctctctgtgagcctcagttttgtctgcttggtacttcactcttattgatgaaatgcagctagctgtgtagtgaaacccagataaaaaaaagctttaagggctgtgttctaatacattgtttatgctggagtgaaaattgactgcacattgcttggtttgtgcaatttactcccgaaatattcctattcaggaaatcctgcaaatagcaatattcatcttgaaaatcacctcacagaacccttagcaagctgagaaacataatcaatgagatcgtgatgtagagggtgaaaattaggcgtaatcacagccctttcccatcagtcagcccactagaaggcatgcctttgaattttgattttcaaatatactctcaatttagacataaaatatgttgatttcagatttcagaaatgataattgaatgctaagatcccgggaccagtttagaatttctataaagggtcttatgtttttaacctttaatgaatgctttcaataatgagctagaggtatactatttatctgacataagactgactactgctttccaaactttttattaaaatatgaggtgtggcgggacacataattttatgttaaggcttagtgactgaaatactttcatcttaatcacagggagggggttttttcctcccctcaagaatcactttccttctgtggtttataaataaacatgacatgtggctctgctggctcttccttgcagtataaggagcataattgcccataatgtcaaatccacactaaaaactaccaaaggactcaattgtagtgactgaccattaaagtcactgaacactgtgtgtgttcacattgctgtgagtgttgtcaaagaaaaatagcactagacaacagacaagaaagactgtgttcaaaacttttgcaatagaggagacagattgaactcaattctgctgaaataaaaggcaggagagcctctaagtgctgagatgagttagtgagaaagtactagatatcaggagggaggttagtcaatgtgcttatttaggccatctgtgtttgctgattggcacttatcaaagttagattcctatcctcccaacagaagactagcagattggggcactatcttttttgatgattctatatcaaagtgctagctcccaagtccttgagaaagtttattcctgaggtataaaagtggcaagaggctaggagaatatttttgtctcaaaaaagtagagaaataatatataaagttttctagagtaaatgctctaagaaaaggaaggtcaggtctaaagtcaggaagaaatctgtctcaaatgtagtcaaactcagggtatttttaaagctttctttgtcaaccctccattttgttcaagggaaaccagttttcccattgaaaaacttaggaacgccagttcatctagttcatttcagcaggtttctgttgttgaaggactagctgaacgaactctgacacttggtagtaatcagacatttcatgaaggagatttccatgaaagttagaaggaagacgaagattaatggttgaagcagactgcaaactcagtttttgagtccagagggcagcaagtcaaaaagattcctagaagctgggctgtaggcattctcagatggtagagtgaggatggcagtagcaatccgatggatttcttggagcatggcacggaagaggttggagtttactgaactttttgcatggcctacaaagcagcagctccaggcatgaaagttgtctatacataatttgctgtggtggtgagtcctttgtagtttatagcaagtcatccagcttctgcttgcagggcttctttagatattgtggggaaatggcagctataagacaacctagagaagagagtccttatctcagtaataatatgggcagtcacgttttagttctcagtgtcaccaagtcaggatggtgggagaaaaatttgaaatgttaatttggagaatcgcagccagattgtaaaggaaataaactgaaaattggtaaggacggacaaaatgtgtaagacagcaggatccagatcaatttacaggtaggtaaaaaaaaaaaaaaaaaaatcatgtcgtttacaaagaaatgcaaaatagatcaaagacaatgaacaggactagaatctgataaccccaagggttactgaaactctatctctaccatcacccttttgatcagtgttaatcaaagtaagactttccttgtttataaaataagactggcctatttatttatataggggtagcaaaaatggtaatttaccaaataggctattttaagtgtgattagctggaagttttcatgaagaatcacaagctgaataagtttcagagatatactgtacagcatagtgcctatagttaacgatactgtactgtacaattagaaatttgctgagggcagagtttaagtgttcttaccacaaaatactactactctcttttaggagcagtggtacataaggtgagaggaaacttttggaggtaacgcataggtttatggcatagattgtggtattggttttgtatatatactttatctccaaactcatcaagttctatgcattaaatatgtacagctttctgtttgtcaatcatacctcaataaagtagtttaaaaaatatgaaacctcagatttgattttttaaaagtctccaaagtttaggaaggcaagtcaagaacttgacatcagattttacctgaagtaaaatacctatagattcagctgaagtgttctgttttccaggttcctaaaatacccttggtttcctgggtctcctaagaatagaccttccttactcagttgtaagattgggaattctgtaagccaggtaccgggacagttttcccaaaaggggcttatattagctccatatagtcaagagtagctccttaaaactggtcacatctgactctatgcacttaattctcaaatatgacattccagtcaaagccttggttatatatttttttcaattatgtcttgttacctaaatatatttattgagcctatgcaaataattatattgccatgaaaataagaatactcggtaagaatttctgaattttacagggatcaggcagggataaaaagattaatgtttcattctgtttacaaaagcatactctaaattctcatgagttatagataacttaagagaaaaaggaaaggcgtttcttgtatttagcaaacagaacattaaaacatgaggaatattttaaacaaaagccataatcaaatcttttatcagttcattcaggcccatgtagttaattcttgtcttgcttgatcttgagttagtagtttcatgaactcatcagcttcttcacagagtttcataaatcctgactttgtccaatggtataatctcgaagttatttaagcaatggcatcagaagtctgtgtcccagagtacctgtcgtagtacttcctatgggtctcaaagatggtcctgttttactgaagatgatgcattctgacctctaactgattgtaagagcactcagggaagcatcagcataaaccaaaaactatctgtgaacgacaaaagacttaaaatggccataattaaagatctgattcattcgacaagaaattttttttttccctggtgccatgccacattttaaaataacaactggagttaggactgatgacataatattattatcggataaagtagcaccaggatgtgtcatggacacctagagcacctagagcactaacaaagttctaaggatttattataatttttcaagtatttatactaataatagttgacccatacaactataacctagtcaaggttcagcatctcttcttgtcaaagctttttatgcaactcaacataccaaatgaacctagttatttttaacatccttcattttacaagggtgcaggaacaaatcctttgaaatttttcaaaccaatctgagattaaaaaaaattttatttaagaattgacctgggaaaagcaaaatatcaaaggttgtaaaatgacaaaaggtttgaatacttggctgaataggatcattgctcactatgaaagaatgcatggctacctatgtaaccaagatgacaataaaagatttcaaaaataaatgtagaaggccacatgacggtaaaagtttttagttctttccaaagagaaaacactactttctaaaaaaattcaaggacatacaaaatcaacacaggtacttattctgataagaaacaatatttgtttcctatacagattacccaaaatataaaaaaaaaaacaaattttgcaatctcttattaagagaagaccaatagaaaagatgaaaatgttaattagtttgaccgaaataattgttttgcaattttgtgtgtgcgtatatatatatatatatatcaaaatatgttgcatacttaagtatattcaattttatttcaaaagagcagaccaataatccaagaatattttatcattttttaacaaaaagaaactacaactcatttttgatcaatacactgttgatactaagggtcatttgtaagagtttacatacacataaatccattccgttttagccagcattggctattaacataagactctccttccacaaatcttctgccatttccaatgttcattcagattttgtcctataccttcctcttcctcattttcacagtcattttaatttaggacaaagttattctctttttccttaacaaaaacacatccaacataccttgtatattttgcatacaaagttgtttccctttacccctaatgtttctggaagttttatttacatatattgattatatttttaaccattagtaagtcttattttatagagaaaactaggaattagctaagtgtgaactgtttgtcatataccagtatttcatagccaactagcaaagcttatgaatacaagttaaattcacctactcaatatgagggctaaaagtttacatcaatatttgtggaggagccttttaagattttcttttgccctgatatgtaatttatggaggctgtgttctaaaatttgagtaaatgactgaggagatacctagtggccatctgggtatctccaaatcccatctgaacgtacacggtatccagtctgtttccaattagctttttcaacctcaggtggttgcttctggggtttgagttttccagagcccccagtagtggcagggagcataacgctttagagaccatagagagttgagagactggagtaggaagagaaaggtctgtcatggatggacaaagagatggagcaggtacgggtttgaagaggaatatgctgaaggatttaagggagctaaagggaagatcaaaagtagtcaaaggaagaaggaggaatggtggtgatgggaagggagaggtcttagatgagccagcttagggagtgcttatgttttcggaagaggccattgaagttcatctttagtaaaaatcaaactaacaagaagagaagcctagtttgtgccatagaggtgaagcatctaatcagcagtagtcttcagaggaggagaaacagaatagtgagaatgtctcctggaggaaagaggcaccgaaggaacagcaacaacaaaaaaaggaaacatgaatgaggtctctacaaacgtgatctgtacagaaaatgatttctctaaatactgaaaatctgaagttgaaccaaatgagatttcaataagaattttccatgttctaaaccaatgatgcttttcaaacaaagaagcctgggactctagactcaagaatatactcagattactgagaatcaaaatctgatgttaccatgcttccacgctttcgtgggtaaggagtcagacttaccaatggattcccaattaatcagtcaggagtgtactcaacattcacaaaattagctttgcagaggttaatgtcattaaattcactttagaatggataattcaaattcaaatagtaactcccttagatagatgtgtactagctcaagttcacctgttatctgatttcatttttaaaaaaaattttttaaaagtggtgttcgggaggtaaggaacaaggaagagacctttagaaaaaagtttcagtgttttatattggatatgaaaatatcagtggaatgtgtcctgaaaaacactggatgacagttactggacaaaaagacaaattattcccttttaccatgcaactgaacacagatttattgaatgtttttctcctgagtttaggttgcctctgggcaagagtataattctggcttgataacaccttgaagcgtgtttgtttaagtttgtggatagtttcatctattagtggaattaggcatctgcttctctttatgaacactgggtaccataatcttcctcttactttttgttttttctactcaactccaaaaaccattgctgagttgaagtagaataataaggggaaagaaacaaaagactaagtttgaatcccagtgctgacacttactggctttacgatattgtttaactcacttaccctttttaacctgaccttcttcttcactaaaaatgaaaaattgagtgaatttccctgggactctgttagataaggcaaaactaagatgggaacacatttcctaaggcgtagaaaaagacagtgaatgggacctttcttgttgtatcaggagttatggtaagaggtactaacaataaaaattaggctttcagccaggcatggtagctcacgtctgtaaccctaggactttgggaggccaaagcaggtggattgcctgagcttgggagtttgagatcagcctgggcaatatagcaaaaccccatctctactaaaaatagaaaaaattagccaggcatggtggcacgcacctgtagtcccagctacctgggaggctgaggcatgagaattgcttgaacccaggaggcggaggttgcagtgagccaagatcacaccactgcactccggcatggggaatagagcaagacttctttaaaaaaaaaaaaaaaaaaaaaaaaggccttcaaaatacccctacagcagcaagttggtaccagaaaaacactccaaaaaagggagtagatggtcatgagattttcatcgttcaccaacctaacttgcccatataaggaaaaggataaacttgagaacagtttcttgaatgagaattcctggaacagatcattcaaataggactaacaatttgttggacatgagaaaacttctatgacttttactgttccctttcttatgagggaggggagaagagtgcttttcctctttgccaagccaaggaagagggcttcaaagaacctctattatagtggcattcagaccattgtatttataaaaaataaaaatattttagaaaattgaatatctgcttgcacattttaaagatgacatctattttctgcccttgggatacagtaaatattgacattttaaaagggtttatagtacagtttagaatgtatcccgtggaatccaaataccattgcaatataatgtctaccatcatatacttaaaaatacatgaaaaagctcatatttaataaatagaagttttatattattcctttttatttaaatcatatttttcaacttccccaatgaattgtattctaatgtgataaatatgtgatacatatttatgctataaagttttattagccactctatcataattctttataaaattatatttatgtggacttaaattcaatttttaaaaacaatttcctgtgactacaaggctctaagtatttttaaaattctctagattgagtagtatttaaagtattaataataaatacacttagtaataaccaaataacctaaatatatgtaccttttgataaataattattaaacatactcagtggatagttattgaaaatgaatctattatgagatggatgggtatttgatggtaccttgagtaaagaaggatttcagtcgctaatattttgaattgtacttttatttggcataaatgtatcttgactacaatgcaccagtgggataggtcagagaggtgtgcttttattttgtaaagcggaagaaagtctgtcattaaccaaaaagtgggcaagaaaattggaatgaagtgcctaccacaggaacaaatccagtcaaatcttttttttgtttgtttgtttgagacggagtcttgctcagtcgcccaggctggagtgcagtggcgtgatctcagctcactgcaagctccgcctcctgggttcacgccattctcctgcgtcatcctcccgagcagctgggactacaggcgcccgccaccacgcccggctaattttgtgtatttttagtagaggcggggtttcaccatgttagccaggatggtctcgatctcctgacctcatgatctgcccgcctcggcctcccagagtgctgggattacaggcgtgagccacctcacccggccgcaacatgctgttttaatgagcgcctgggtgcgggcagcctcaggcctaaaatggcgttagccccaagtgaggactggacaaaggttttatagtctcctgtaaacaggaagtctcctggcctgacgtaactgctgcattgtacccggatggcctctttctcgatcttcagaggtacttgtcttctggccggctctcttcctgcttctgctatttcgccggtgcatgctgctcaggcaagtagccttgtgccttaggaatgggcctgagaaaggaggagttactcatctccttaagctttcaggcccgggagagaatcttacaacccactgatgagttatgaaatccatttaatgggtaaaataaaatagaataagatagcatagggtaccaaagaatataacgcaggttattacattgtgttacgtgtggtatgcttaagtgttgttttctggaactgttgttatcatttgtattgtacttcatttttgtttcgaattttaagataatctgcacagttttatagaaaatgagttaattagtactgtatcagtgatgtcatactgggttaattattacaaagttgggggtaaatttatccctgtataacagactttaaagataatataaataggccaggcgcaatggctcacacctgtactcccagcactttgggaggctgaggcaggtggatcacgaggtcaggagttccagaccagcctggccaaggtgatgaaaccccgtctccactaaaaatacaaaaattagctgggcatggtggtgagtgcctctaatcccagctactcgggaggctgaggcaggagaatcccttgaacctggaggcggaggttgcagtgagccgagattgcaccactgcactctagcctgggtgacagagcaagactccatctttaataataataataataattttgtttatttattgaatagatactttcttccagtacaaaattcaaaagcattgaaatcctctgttgcattgttgtctttcagccacacagtttctctccccatgtgctgccaaggttttcagtttcctgggtagccttccaagaataggatgtaggtgtgtgtgtgtgtgtgtgtgtgtgtgtgtatattattttctactcttgtcctcttaaaataaagccagctgttagaatactataaatactgtttctgcatccttcaaaagatggttcttttgaagcccttttccttggcttggcgagggcagaaggaaaagcactcttcttcctccttcataagaaaggaaagactaaaatgcctgtgtgtgtgtgtgtgtgtgtgtgtgtgtgtgtgtatagcactcttctccctcccttataagaaagggaagagtaaaatgctgtgtgtgtgtgtgtatatatatacacacacacacacacacacacacacacaggtgattattttctgtattagtagttaaagaactgtctctttttttttttttttacagttgcatactattctgttctaaggatataccataattcacttaagcagcactccaattagtgagcctttagtttgtttcgacttttggctaagataagaaaatgtataactttgtgcacatcattttacacgttgcaaatatatctatgtgataaattcctagccgtcgaatggctgcgtcaaactggcatttgtcttgttagtacattttgccaaattgctcttcatagaacatctcgtcagtattaggaaaggtttcttttccccatacccgtgcccactcagtgtgttatcaacctttttgatcttctaaacaagaaaaatggtgatatctgtcattttaatttgaattctttattcattttgtgagtgaatttgaattttttcatgtgttgcagaatcatttttatttccttttctatgcactgtttgctacttttttgttttttgccaatgttctcttttgggttattggtctctttcttactaaggcaaatatagtttacaacttgaagtaaaaacatggttttctatgataaaggttttaatgaatgttttctacaacagacagattctagtcttaaggttataacctgaaaacatcaaaactaacctttgaattgcataggaatggtctttgctcttcttagccatcaatcctggacagaagttcaacatgatgacaaattgtagcacaagtagagatttaaaaaatttttaactaatatgtaaatatttgctttcattttcttatttatctaacaatacattgatggctagaacagggtttgtctttgcaaagagcctgtgtcaactgactcccattctttcaaaatacattacctaaagaaggtttgtggcttctctttgcattgcattttctagccaaatctgaaataactatctggaagcttaacattttattcccacacttatttttccttgtgaaaatcaaaactgcactttcccagtcttcatgagtaaccacaatggtttgccatttgacttgccagttgtattagcatactgagatgtaatttatctgcatcaagagagttaattctgagcagctgggggctttctaatctctttacccatcttggacaccagttccctctcactgctatttgttttattctttgcagttagaataccattcctcttgacatacaagaaacaaacccaatagaaattaaaaggttccaatttctattttccattcaccaatattataccattttctcctaaagcagttctactctctcctagatcattctcttgcttttgaaataaaccttaaaaagtcattttgtcaccctaaatatgtttatactttcttgaaataatgcttttactgcatattagaattttagtttttacttagcagtccttcactactcctttagaaggaaatttagataatactttgaaggaagttatgagagaacgtcagaagccatgctatcagttttttttttttatgtactctaaagaaaactctgctctgcccatgggtgtcatctctttctgattctgtgtggaggagaaaaatgggaacacttccaatcattttcaaacaatttctgcttaagtggatgaatggaccacctggtttactaactataatgcccaggggatggctttgattggcagacagaacgcggtgcagaaacaatggaagttaaatgaggaaggttttaaacttgcaagttacctcccttggtggcattgactgttggtagaaaataacacgttgggatttcagatacattcagacatgctctgcacttgcaatttgcaatacttaaaacaacacaattcttctaatcataactttttaaaaaatttggccacctttctccattgtctcataaagctatattcatgaagctgtttattcacaaagtcgtatcatttaaagataagtgttatatccataagtatgtaaatgaattaaaatctgggaggctaacacttatccattccttattctactatatcctatctagagccatgcttcttaaaatttaatgtgaaactgttatttctggtctgtggaaccacagtttgaaaagcactgtcatagattcttaagtagatacattttcatgcatacaataaatatgcaggagaagttaaatgggtatgtccgggagtcaaatattgattctcagaatgaaaacttcttcatttatttctcagtgatcttcataaccctttcccatactgggcagtgagaaaaaattatcatctcactctgaaatagtgatttcaccagtctctttttatgggttgggacctcatggataatgaccagtcttttagatttccttgctctcctcctgctcctctccaaaatggcagctgggttgacagatgaggaagcattatacatgacctgagatctctatgcaggtacttgcagtctcctctgaccctctgctctctggaacagtgcctcttgtctgcctgataagtctctaccctgctgaccttgtggctctgagcttgtattttcatcaggaaatacggttctctgctgactatatcagttactaaagggattcttaaatctctgagttactgctgaagaacacttagaattctaaatttgtaattatgatacctctaaaaacaagcgtgattatccattatgtataaggatgccttccaaaaagttggagcaacttgaagccacttgttacattgtcatttagtggaggagggagtgaacttggtgtttacaggtagaactctctatcaggtgctgtgaggaaaaacaaaagcaagataaactgtggccataatctttgttactttatttcccaatggggagaaaaagacaaatatatatatttgtcaaaactgaacagatgttatttgaacattatactgtatatgccattataactataatgtatataatacatatatataaattattgaacactaaaaagaacactttaagaattatctattttattttttttattatactttaagttttagcattaggagaagtatctattttaaataaagctatttcactcttcagtttccatctcaagaactcataccaatttaaacttccactcatatttgagagttgagaaaaattaccaaatgataataatatattatctaaaaaataatttaaagatgcatgtctctaacaaaactatgtaacattctgaagggttttaagtaatacttcatatatcctaattcagaataaacttagatgttatcagtatgaaaatatatcataaagtaacatgattctctccaatgaagatgtaatcatccaaactttatgcgttgaatttacggcttagaaatgccatagcaatatgtcctcttgaatatacaattctatatactgagatttcacttagtatattaagttctgtatcactgaagagtatattatgattctaattaacaaatacaattctattttatataagtacccctatcatctactaggcaaagttagctgatgttactatgcatttttttgtcagctgtactcaacttataataactttgtattccaaatacttcaaaattgccatatgcttactgttttcctattcacatcattttcccccctattcttcctgaccctcctttgagcaatagtgtcagtgggattagactcatgcattcacatactgaatgaatgaatcagtatgtgattcatgatatagaaaatttaaattccttatatatttcatatatcatatatatgatatatgtatctgtgcatataggggatattaaacacttctctgtatatatctgacatatattttgaaaaggaaacaccgtagggccaagttaactgcttcaattattacttagtgtaaatgcattcagtttgttctgtaatttcaaaatgatacatataaaaaagtagagtttgcatgtttaatacatctgaagctacagtttccaaattctgaacactttggtgacccccttgacacaatgaatatttggcagttaccgaacataacagggcacaaataatatagttaatgaaaacatccataattatttaaattaggctattttaagaaaagttttaatttgaacattaaacagcttaaaatcatttataataattgattatgtaacatgctggtcattaaaatgagattggtattctctttttttttttttttttttttttttttttccgaggtggagtcttgctccatcacccaggctggagtgcagtgctgcgatctcagctcactgcagcctccgcctcctgggttcaagggattctcctgcctcagactgccaagtagctaggattactggtgcccaccaccacacccggctaatttttgtatttttagtagagacagggtttcaccatgttgaccaggctggtctcaaactcctgacctcaagtgatccgtcagcctcagcatccgaaagtgctgggattacaggcgtgagccaccatgcctggccaagattggtattcttgacattaataattttggtaagcattaagaaggcaaaacatggaagcactcacaataatgtataggatccaagtaaaattctccttactgaaacatgaaactacaaagccatgtgcgcatacttttaatttttaagatttgtttgaaggaacttttgtgaatgacaagtagagaaagtgtggatagatagcatctctgtctttaaaattatttgatgaaataggtgataagaaacacaaaaattaataattcatgtgacctttattacaatacgtcttctggtattagcatagtaataagtattagtgatttacataattggagagataacacaaatacaaattatgcacacacacatacatacatacacgttcctgtgcttcactcaaaactgaacagatgttatttggacattgtactgtgtatgccattgtaactaaagtccaatttgttagagatagtattgttattttattatctttagtatcttcaatgagtccattatgaatagtagcattaactttgcttatgactagcttaaatagaactttggactccataaaaatacgaacaaagatttttaatggctttagaatacagaagtaatctggtaaaagtattcttgattttaatagaaaccaaacaatcaatgtgcccgttagattaacagtgaataatcagattgttccagctcttcactaatgaacaatgctgaaacaacattctctgtaggtctcctcagatagacatatgagaacacctagaagtggaattgttacctcattagagtattcacatttttaattttatcatatattgcaaattgcttttccaccagcagcaagaagtggcaggaatttattattttaatttgcatatccctggttgaacaagttttcaagtttgttggacagatttttccttctgtgagttgactcttcatatatttaccccaattttccgttggattgtttactttctcttaccgattaatatgagttgtctgtatattctagattctagtagagttctggattatatgcacctaatatataagtctacaattccttatccaaaatcttatcgttgacttttcaggagactagtgaaaatggctacttagtggaacatatggaaatcatgagttataagtgtataaaggctaagtgcaacagtctaaagacctggtatcacagatgaagactgacatattgagtaaaccaggaattggctttattacataatgtgtcctttttcttgatttcagaaacccatatatttgctgtttcctgtacatgtttaggaagagtattcagaagagagaatgcagatatattgttgctgtttttttttaaaaaaatacgagtttaattcaattacccatttgattgcttgagtttattagttatggtagcacttagaaagagttgttttagataatgactatgattttggtacagaacctaatagtaaaaacaaaacatctttaattttatttaaagtgcatgtcagtcatgaagtcagaattgaattgctcttttctttgcttttaatgaaaattagcctaatggctgttttatctttaaaaagcaacttctagtgtttaataataacagatttaagtaaatattctgttaagacttaaagaaccatgtccaattactatatggataataacttagagatgctctatattggtttaaaataatgcaaatatcactggccactattcagagatatgtcaaaatcacttttgtttaatatgtgcctttctagtccttagatctactgtattccctaatccttttggggtatataatccagagatattaggacccattcagccagaaactgaaacatgccatgatggttagaattcatcagaaccacactcaaatgaatgttaagagacatagcgtgataaaagtgcatctgaaagagtatatgaacagatgacattacatacaatgttgtatataagagaaaggaaggaaagacattcatatcatgtcatattaattcatgtacactgaaaatacagaccgtgaacagacattctttcatttgttccttcatgtattcaataatagaatgcttctctaccacagatgattccaggggaatttggcaattgctggagatatttgtggttgtcacacatgggggaggagaaagtgctactggcatcttgtgcatagtgaccaggcatgctgcaaaacaccctgcagtacacagggtagctcccgacaagaaataattatccagtcccaaatggcaatagggctgaagctgagaaaccctgattgaaactcacattacatcctaatcgaaactactttgttccgttctgagccgtaggattcatcaaataaaacctactttttattggtacaatatttaaatccagagaccctgtagcatagtaattatgtatgcaggatttgcctcagaaagactagggttcaaatctcagattcaccatatgttaggttgtgccctaggcaagtttctgacctttcgtgactctagttttttaatctgaaaaaatggtaatagtattgctgagaggctctgcaatggagattgagattaattaagatgatttatgttaagtgcatagcagagtgtttgcacttagtcagtttccaacaaatggtagcagtattacctttacatgtactaaatcatttcatcctgacctactatgaaaagcctgatcactttccatattttactgtttttaagataccattgattagagtatgcattgttattttatttttcaccaagaaaaatgtgctgccgttttagactatgacacgctatcatttataaaacgtgtcccaatttcagagcagctaacctgttgaaataaaatgtgagtcttataattgattattgtaaaacacaacagtaagtcttctttgattaggtgcaactgaacaatactatgaccacattcagtagcaaaggcacttagaaggatataggaatatagcttagcaggaaggtagcatcgggtatctctctttagtaggatgagtatgcgtagcaatctctgaagcacccagggagccatccaagagctattcactttgcagcacctgtccactctctcatgacatctcaggtgcacaggaaggaaacaaatcgagatgctgggtcaaccctggcctagaagccttatgcatcccagaggccaatgccttgtaacatagtttccaaggtcctcaaaaaggacatgcttagttacaagaattgttgtacttggggacgccccacaattatggttttccattaggtatttatagttcatatgtagaacacctaaccaaggtgtaatttaccagtccccatcatttttttttttaatctgaagcaatgttgcctgctcacacatttgacattccaactttatcagttttctagggagaagggagctagaaagttgatcaaagtacaaattctcatacagatggacaaagggtgtttttaaccctttactcacagtaatatctgttagtttcatttattttatatttaaagatactgaaacctgaaacttagagcagttaaatgacttgccccaactcatgggctaataagcctagaacccagatgttcttatttctagactgattatttccaacaacactgtaatatcctaaagcaagagtcagcaaactatggtccaagggccacatttagtcctccacctattttcagaaataaagagttattggaacacagccacatttatttgttcatgtattagacctgactactttcatgccacattggcagaatttgagtttggcccacaaagtctaaaatatttactatatggtgttttatagaaaatgtttgctaacctctgctctaaagtataattacaaattggccaggtgcagtggctcacacctgtaatcccagcactttgagaggccgaaatgggtggatcacttgaggccaggagttcgagacgagcctggccaacatggcaaaaccccgtctgtactaaaaacacaaaaattagccaggcttggtggtgcatgcctgtaatctcagctactctggaggctgaggcacaagaaccgcttgagctggggaggcagaggttgcagtgagccgagatcatgccactgcactccagcctgggcgacagagcgagactgtgtcaaaatagtaaataaataaacaaataaattctaattataaattgtttaactctttctatgagtctatataaggagtttatagaaaagcatttgtttctaatgtttgattattaaaaatacccctgtattttttattttattttaattgacaaataataagtacatatatttatgaggtacaatgtgatgttttgatatatgtttacattgtggaataattatgcatacttgaaggattttagagccacagagcctgaacctaaccgtttctctacatcagtgttggccaacttttttctttaaaaggccaaatagaaaaatttcagtcagtttttgaggcttcatgggccatttggtctctgttggaaatagtcaattcatgctaggattggaacctagataaccagactcaagagcccatactcttcaccagtaaggacttaggaaggcagcaagacctgggagtaccagtttaaatgaatgttcttctaagcagtgtcctgtgctgctattaaaccagaccagagctttggcccttagttaagaactgtatgtataaagttttccaaaataatggcttcaggttttcacaaagtccttccatccaaacaatgcagattgtacccccttaagaatctgttcttaactgccatctgttctctgcattcttaaagtctaatcttaatacagcagccagaatgatctgtttaaaaataagtcagatcacatcactcctctgctgaaaactctcctatgcttcctaatctcactcaggataacagccaagatccttccaaagatgcaggacctatcctcctccatccccaactctatgactatcattcctactactctccccttgctcactagattccactcaccctggtgtccttttttttttaattgaacatacacatacactcctgccccagggcctttgcacttgctgtctctgcacagattgttctttcctgagatagctacttgaatcgttccctcacttccttcagatctttatttaaataccacctactcagtgaggctttccctgcaggcactttctaaactctccacatgccacctccctttgccccatacctaagtctcttattcctatccagtgctttacattttgttctttagcacttttcactctccaaagcaccttaatttctcttttactacacattatcaccattagaatgtaagttttatgaggacacaaaaagtttgtctgttttattcgctgttacatatctagtacctcaaacaatgtttagcagacaataagtaatctgtcaatatttatggaatgactcaagtgattttttggaagagttttggtaatatttcatttgccaaaagaattctgccaaaaagactttgaaacccccactttaaggtggagagcttccatagaggcttctggatgttacttgatggtcacacctatgcccactctttcactggccttgaacatttcaagtatgcagcttagtagattatatcttcacagtttcacaacactttccagtttaaaaatcaatgctgcattatgctttgtatatttggacagattatttttgaaatccataaatctctaagttttttttttttaagtctccctttggtgagctgcccttgattagttcaaaatgggaagagagaacctgtcattctttgtcaatcaggttggcacgtacttgacagcatgcagttatagtgaaagagagctgtgttgcagtggtctagcaaacctaattgtagttaagtaaaagaacagtcacccaacatgagaggaaagacaaagaaactcaactgaacaatgttgtgtttttccatccatcagccttcatttgtcagagtctgactgacaatctggactgcagaaatcaggctctaacacaatattgattccatttcatattttgtttcttgctacactttttagcaaacagtttctgtatggaatgagagatagtgcagtcaatatatgcgaccagggcacatttatattaaaggcttactttggtttttttgtcccagaaatcacatattgtttgtttgttttactataatattgtaattgtcagctcttgctgcagtaacaaacaatgacaaaattccagtgacatataacaacaaacatttattactcactcatgtgtctgcagatcagctgcagctttactccacactatgaatcaagttaaggtcttttcattctagaatatggatctgctctaaatgtcttctcatcccaggaccctagcggaaagagcagcttttatatggcatattattctctcatgatggaagataagaacaaggggaaccagcaaatcttgaactgcctttaaagttccagctaagagctgccacacagtcccttctgtctgtccatggtctattggtcaaaggtacacagtcaagcccaaagtcaatgggaagggaagtatattcactgcagggcagccatattaagagaggaaatgaataataatgaactgacaaatcaaccatagtatccacaaatgtcttaggatttcattgattcccaaatgcattttttagtatttcaacacctctgaacttgagatatatcgtacaatagataatgtttacaaagtgtaggtttttttgttttttggctttcttagtttacataacaatagtggcccttatcatcaatgatagattagatagaaaaactgttaattgtggggttgacaaaatagccaaatggtagaaggcactccttataagtaagtaagttatgagtgggagctaagtgatgagaacacatggacacatacaggggaacaacacacaatggggcctatcagagggtggaggttgggcggagggagagaaccagaaaaaataactaatgggtactaggcttaatatctgggtgacaacataatctgtacaacaggccctcatgacacaagtttacctatgtaacaaacttgcacgtgtacttaaaataaaagttaaaaaaaattaagtgaatggacacttaatgtttacaaaaaagttgtcatttttatcttgaatttcttttttctgtagcaatatttatatctcattcagatcagcttatttgattagaaaaccaagcattaatagtagatcttatgtctatttattcacatattcatataccttcatttataaatatatattcatatatatttagaagatcaattggaaaacataagtgccattcccttatttaaaactcttgtagcttctccactacagttctgagggtggtatacaagatccttcttttctctggcttttgctttctatttctactccattacttcccattcccctacgtgatagctccgtacttcttctgcttcctgtctttgcatgttccatgttccctcttggaatacattctctctgccgtccatccccttataatgaggtgcatgagctgtttctgctcccagcctttctgtcctgaccttcttgtctatcaaacacaaaagtgatcagttcctgctctgtgctccattatacattgcactttactagttgttatacctgacctgctctaaatgtagtatatatttgtgtgtctgcactccccattcctaccccagtgaaacatagtaagcactgaataaatgtttgtcgaatgagcaaataaataaataaataaataaataaatgtttgaacatacatggaaaggttgtttatgtcctccttataatgtgctttgagatatatattcttaatatatatataatcatatattctaaggttattagtaggtaaaatgaaaatttaaagaaattgagtacaagaaaggaaaacaaggaagaattttttcctttttgtactatttctaagaacaccaaatttctagttaaacacacgcacacacaatcggcatgatgtagaattagaaatatgttgaataaatcaattattagaaaatgtaaatatatattaatttgcctctgacttgctacttttaccctcaagggttttttttttctacctcttttcatcactaatctttgcttcactgcttgtcagatcagcaactgcccattattagtaatgccatttaataagagataaataaaagtaaaggtgcttagagttactccatttcaaaaacctatcagggctggatttcagaagagaccatgaaattctcctactgttattgaaccattactccctattacctaattaatacaagttattttcttaaaattatacctgacattgtagtgaactatcaatactatgaagaaaatcaaactctcctcgtatcataaggatcttaacacctggtacacaatcttgcattggaggggacattaagaataaggcatggaggaaaaaaaaaccttaatggaaatgttctgttattagaaatgagactttttggtggaaatcccatgacgactttcttgtctgaatgttctttgaagttgaacactttctccttacacaagccggccactataattagctatgtttccattttagtggtggccttcttcaccttatctgaaatcatataaagatgtgaggccatttgcgagataaaaggtttgctcaaaccagttctctgacctggatatcagaggtttggcaatcataaacccactaagagaaaccctcagagctattacaaggctatgtaaaactttatttcattttttgtgagaagggacaggattttctctcatttatattctggaagaatattgtagaatgtatttgagttcaagaggaggagaaataattaacataatattaagaaacgtcaattttggaaagaaataataagcatatatgcacatgtgcgtgtatgcacacacacacacagtatacacaacagattcagaaagaaggaaatagagatttggtgacacatacttcctggatataatctcaactctgccatttgcaagccacatggtcttggataattgacctaatctctctcaattgcagcatctgtgaaattagataaaactttctttgtaggagtgtatgtgtgtatgaaaagcacagtgtttgacatataataaatgttttagcaactgtagcttgttaatattatcacagcagttaatatcactatagcagttagttgccattttcagcacagctaataattttagtagcattttctgatctttccatctcatgtggtttctttggagttgtttcttgctttgttttttagcttttctatgtcacattttatttgcatggagaaataacaaattttacaatttatttcacatattctttaatttttaggataattgtcagtttcttacagtttattttccttatactcactgaagaaaatatgtacgaaagaatattttcagtgaagttaattggatttactacagttgacccttcaagcaatagtatcttgcccttaataactgacctatctttgaactaataaattcaacctgcaaataaatgtagtgaggtaaattgtagaaatttatcttcaaaatggtctttctaaagtgatctatcaaaggtgcatttaattagaggtccagttctccaaaaatgtgccaaggaaaagtagccacaaagaatttagagctgaaatgaattctttcacccattgctctgtttctatagaactgagaataaatctcatatgggtacttaaaatctgtactatgtcattgaaggatgaaaagatgacaatagtgatgatagaaggacacggtaataggaaacatttcaatagagggaaatgatgtgagtatgcaatgttcattcaccagaggactaaatctagggctattttggtgacttgaacagggaatattctacttcctgcaagtgaaaaatatggacatttcatttggcatgccacctgctcttcagtccatcatgtagcaagcacccacttagtactttggagctctaagtaatacttggactactcaaatgccagccttgttgccatttctgtttattcgccaataacaattttattaattaaaatttgtatgtggatgtcttaaggaaattccttgtagttgtcaaagcagactcctgatcctatctatctgccagtgccttctgagtagtggtatctattcttcatgatttttggaactatttatgggtgattgaagaatatggagtggatagagaaggatgctagtcatttggctgcacacaagaaacacagatgaaatttttgactatttctgttcattttctaaaggtacagaattttcactggattgtacttgtaagcaattttaaaggaagaaatatccagccttttgaatttgttacagtgttgcaagacttttttaaaatgttaagaatttttatcatataggatgaattaatactctcataattttaggtttgtttcttccataattaataactatccttaaagattgtgtgtgtgtgtgtgtgtgtgtgtgtgtgtgtgtgtatttcttgattttccagagcaaacgttcccattcatttgttttactcaccttgttatagttgctcccattgtaagatatatctagtaagtttactgttgttacctaaatctgtttgctgaattttaaaaatgggaacatgtagtaaatttgggggaccacgagctagtatttacaaagtaaaccgagaacattggatataaaaccttatttcatttaacctccaatgaaggatatattcagtattattatttgtattatttcttgagcttccttgcttatctgtaatatgtaacatggtggcaccccttttcatataattctctcctcacttctattttgggtttttacatgttcttgtttcagtctcttctgctctttctatcttttcttggttcaactttcttctcttatcctgtggaggcgaatacctaattctggctctatcctcttcagtcactctacaagtatcactgggacaatattgtccaactactatttttacctccaaacctgtattcttagccttacccctaatctgcacactacgcttctttttgcaattactttctgtacatttgcatcagtgttaatcacaggcatcttgactcatgtctccaacctgaaaacattattccttccatatagggacaggctcctctgtcttccctgtacccctagacagtttctcccaagttataaaatcttggtgattctgaaaattttctttttccccatcaagtcctgccagtcctttatccacaacataggaataatacttcctgaacatccgtgctgctcctgtttgttcaataagtactcggacctctaaaggcatttcctatgtttcttccaccagccccttatccttaaaatcttgcctccaatctgccgctagagttatcatcttaaaagagtcaaatcagggttggtatccaagaaatattacaaagtactaagctcttggtatatacaatcaacttgagagaaagagagggacgggaggagagggagagagagagagagagagagagagagagagagagagagagagagagagactttattctgtcctctataacacctgaatgattctgtacatatttatgttaacagagcattgtactacttcaaatccttatacaagcaaaactcctcaccgccttttggcaatggaacttgcttttccctctgcctgaaatagtcttcagtatgttgacatgactcatttcttcacttcattccatttcctgaagagaggagcagtcttctgtgctcacattgcctaaaatagagcccactgtcactctctacttactctttttaatctttcttcatagcatacatatacatatatatacacacatatacatatatatacacacatatacatatatatatatatatgtatacacatatacaggcatacctctgagacactgaaggttcagttccagaccaccataataaagtgagtcacatgaactttttggtttcctggtacatatagaagtcaggtgtacactacactgtaatctattaagtatacaatagtgtatgcctaaaaactaatgtacatgccttaatttaaaaatatgttattgcagtgttcaagctgagagccaaatcaagaatgcaaactatttacaataaccacaaaaaataaaatatctaggaatacatctaaccaaagaagtgaaagatctctacagggctaactacaaaacactgctgaaagaaaccatagataacacaaacaaatggagaaacattccatgttaatggaaaggaagaatcaatatcattaaaatggacatactgcttaaagcaatctacagattcaatgctattcctatcaaactagcaatgtcatttttcacagaattataaaaaactatcctaaaattcatatgaatctaaaaaacagtctgaagagtaaaaacaatgctaagtgaaaagaataaagcatgatattaaccaacttcaaactatactataaggctacagttacccaaagagaatgggacttctacaaaaacagaaacttggaccagtagaacagaatagagaactcagaaataaagccgcatacctacagccatctgatctttaacaaagtaaacaaaaaaaaaaaaaatggggaaaggactccctactcaataaacggtgctgggatagctggctaaccgtatccagaggaatgaaactggactcctacctttcactatatacaaaaattaactcaagatggattaaagatttaaaaaaataaaatctcagccaggtgcggtggctcacgcctgtaatcccagcactttgggaggctgaagcaggtggatcacgaggtcaggagattgacaccatcctggccaacatggtgaaaccccgtctctactaaaaatacaaaaaaattagctgggcatgctggcgcatccctgtaatcccagctacttgggaggctgaggcaggagaaccgcttgagccagggagtcggaggttgcagtgagcccagattgcactgcgccactgcacttcagcctgacaacagagcgagactccgtccctaaataaatacaatacaatacaataaaatctcaaactagaagaatcgcagaagaaaacctaggaaatactattctggacatcagccttcagaaagaattcatgactaagtccttaaaagcaaatgtaacaaaaccaaaaattaacaagtgggatctaattaaactaaagagcttctacacagcaaaagaaactatcaacagagtaaacagacaacccacaagatgagagaaaatatacacaaactatccatcagacaaagatctaatatccataatctatagggaacttaacaagcaaaacgcagataaccccatgtaaaaagtgggcaaaagacatgaatatatagatacttctcaaaagaagacaaacgggtggctaacagatatgaaaaaatgctccacatcactcatcattagagaaatgcaaatcaaaaccacaatgagataccatctcacaccagtcagaatgcctattatcaaaaactcaaaacacaatagatgttggtgaggctgcagagaaaagggaacattatacgctgttggtgggagtgtacattagttcacccactgtggaaagcagtttggggatttctcaacttaaaatgcactgtcattcaacccagcaatcccattactgagtatatatccaaaagtaaataaatcattctaccaaaaagacacatgcacttgtatgttcactgcagcactattcacaatagaaaagccaaggaatcaacctagatgaccatcaatggtggactggatgaagaaaatgtggtacacatacaatatgaaatactacacaaccattaaaaagaatgaaattatgtcctttgtagcaacatgcatgcaactggaggccattatcgtaaatgaattagtaggaacagaaaaccaaataccactttgttctcacttataagtgggcctaaacattgggcactcatggacataaagatggcaacagtacatactggaaactagtaggggaagagataaggaaggggcaagagttgaaaaactaactattagatacggtgcgcactatctcagtgacaggatccatcatactccaaacctcagtatcacccaataaatatataaatgtaacaaacctgcacatgtaccccttaaatctaaaacaatagttgaaattatttaaaaaaatactttgttgctaaagcttgctagcagtcatctgagccttcaatgagtcttaatctttttgctgatggagggtcttgccttgacggagatagctgctgaccgatcagagtagtaactgttgaaaggttggagtgactatgccaatttcttagaataaaacaaccatgaggtttgctatgttggttgatttttttcacaaaagatttttatgtagtgtgtgatgttatttgataacattttacccacagtagatctttcaaaaatgaggtcaaggctctcataccctgctgctgctttaccaactaagtttacagaatattctaaaccctttgttgtcatttcaacattgtttacagcgtcttcaccaggagtagattctgtctcatgaaaacactttgttttgctcatctataagtagcaactcttcatccattgaagtttcattatgagatgacggccattcagttacaccttcaggctccactttattctagttctcttgcaattttctccacatccagtgacttcccctactaaagtcttggaccctcataggcattcatgagggttggaataaacttcttccaaacaccttgtaatgttgatatttacctctttctatgaatcacaaattttcttaatggcatctggaatggtgagtcctttccagaagattttcagtttacccagatccatcagaggaatcgctacctagggcagctatagccttacaaaatgtactttttaaagaataagacttgagagctgaaatgactcctttgtccaaggactgcagaatggatgttgtgttagcaggcataaaaacaaaatctcttggtacatcttcatcagacctcttggctgaccaggtgcattatcaacaagcagtaatatattgaaagagattttttcttctgtgcaataggtatggccagtgggcctaaaatattcagtaagtaaaccatgctgtaaagagatgtgctatcatccaggctttgttgttccctttatagagcataggcagagtctattagcataatcttaagggccctaggatttttggaatagtaaatgagcattgtcttcaattgaaagtcatcaattgcattagcccctcaaaagagagtcagcctgtcctttgaactttcgaagccaggcattgacttctctctagctatgaaagtcctagatggcatctttttccaatagaagactgcttcatctacactgaaaatctgttgtttagtgtagctaccttcatcatcttagatattagcttgatcttctggatagtttgctgcagcttctccatcagcacttgttgctccacctttcacttttatgttacggagagggcttcgtcctaaagcctcatgaacaaacctctgctggcttccaacttttcttctacaatttcctcacctctctcagcattcatacaactgaacagaattgggccttgctctggattaggctttggcttaggagaatgttgtggctgttttgatcttctgtccagaccactaagacattctccatattaacaataaggctgttctgctttgttatcatttgcatgttcactagactggcacttttaattttcttcaagaatttttcctttgcattcacaacttagctaacgggcacaagaggcctagcttccagcctctcttggctttcgacatgccttcctaaccaagcttaatcatttctagcttttgatttaaagtgagagacatgcaactcttgttttcccttgaacatttagaggccatagtacggttattaactggcataatttcaatattgttgtgtctcagaatagggaggcccaaggagaggaagagaggtagggggatgactggtcagtggagcgttcagaatacatacattaatggattaagtttgccatcctatatgggcactgtttgtggcaccctgaaactattaaaatagtaacatcaaagattactgattacccatcaccataacagttataaaaatattgaaaaagcttgaaatattgtgagaattatcaaattgtgacacagagacatgaagtaagcacatggtgttggaaatgttgctgatagacttgcttgatgcagggttgctacaaaccttcagtttgtaaaaaaaaaaaaaaaaaaaaagcagtatctgcagagccaataaggcaaaactcagtaaaatgaggtatacctgtacatatacatacatgtgtctatatatccactcacacatatgtgtatgtgtattatatgtgcatattatacatatatgttgatatgtgtatttatcatatctaatacacatatatgtatatacatgtatatcacacacatatattcatattgtaaattgaaaattttctagtgctgtatcccaatctctagcttataaatatattgaatagatgatgcagcaggtatcttttgaatacgcactccaattttagaaatataaatcttttttaaaggttggaataatataagtagtttggtgttcagtgcaaaaggttttaatgtataaatactatgaaaacaaaagttagatcaaatgtatcaaatacaaatgatctgtattgggggacagagggacacattaaatttaagggaatatgaggagaatattgacttcctatgctcgatgagtgaaaaagaaaagtgaagtgggagtgtttgaaaggaaagatgagcttttccatgctagtacatcacaggttttaatactcatagaagtttttagatttgtataggaaatatgatcctccagcctttccaagtttactcttctactggaattacaaatcaaaactaataaatgtttactatgcttcaagtgcaatagttataaagtacctgattagaggtcccacattcagatgttggttatataaaatattcatgctaaatcatataaatgctaaaacatttgtatttgtgatgttctcttggattgctagatggagattaaattatacaaattcagctaagaagaaaaatgtgggataaatggaattttagtttaaaggaagtcaatgaaaggattaattaagtataaaataatcccattttaatttgtcatagaaatgagttttctgagacattgttgtaatcaataacgtgaagatgtaaaattttgcaaaaaaaatcattacgggaaatccaaaagcagaagagtagactctgtatttaactctagcagattatttagaaagaaaatagtctatgccatgaacctttcgactgtctgcgtgaacaaatgtctctagtaatacacactcttaactcaattcccataggctcaaagttgcaacagtatttatttgcccgttcaacggttttttgtttagcacttactatgtgttaggcacttccagggatatgagtgaacaaggtagttatgggtcttactctcatagaggataattctttaggaatggtcaaaactatacatatacacataatgtgattaattgtgatgtgttttgaaggaggaagcaaaggagttggaacagtttaaataagactgtaggttggcagtgggaacaatggtctttgctatcatttttcaaaaattccaatgaatgggaatgacgactgttgcattaagttgcctgtctccctctgacccatagtgattctctattatcagagaggtagggcatgtttttcagcatatgtgataatatcaaacagattcagatggtgaaagtaaaatttcttaatgcttagaaataacataatttgatcaaatcatttggatatgttattaagttgttgtaagatatgaagacgtagctgttactactgccaatagtataaactttggattcagacctagctgtgtttgaatattaactctcccacatcccacgaggttgtgggcaagctattcacatcattgtcactaccgtcactactatcccacccacccttgcttcattttcttatctgtaaagtggcaatctgttggaatcagggttggggaaggcaaatagtagtcattatacgaatggtaactatgctatcatcaataatatagtctacagctatgatgaagctaatcagaaaacattgtctattaccagtaattagctatatcaataactatcacaagaaaagtcccagctgtcagtgaataaatagaaaatagtgctttgtcttagagaaacacatacaaaatgaatggtggtgacagtgctttaagttaacttgtcagtttatatgtgtaatgcatatataatttcaaatgtataatttagacattgtacatgtatatttggcctggtaatttatggtatacataaatgataaatgtataggttgaaaattcagttactttttttccttttcttaaatcatttttaccttgctgaagatatgctcttttctctacttccttagaataatatattttattttctcttaaagtattttgagaccatatcaccatttactacaccaaaatgtttttttgcaaatgcggtattcaagggtgaatttatagtggctggggacctatttggaattcagtaagtaaaactagattttccttattcctcatctgagatcagagctatttctacctctagcaaagacatacagtcattccgggtgctgcattttcagggaacaatgtgttttcttggcaaggggcagtaagaccatcaattaatagttcttcatgtaaagtagctaaactactgttataaaggaagtgaaatttgcatacataaccattaacacatgaggttagttatgtacaattttgaccaaagtgcctgtttgctgctggtatttattataataagaactggaaaaaaatagtctatctcaagagcatgtgctgagcacccgtaaattgcaagagactgtactgggcagtatgagattatagtaatttgggatttcctactaatgaactgagagggaacaggtacaaacacagtatacgaaggaaacagtggcacggagacacttaaacacagcagtgctgggaggctccggggtaggggagggaggaagagagatacgggttaatcaggagctgctctctggggaagattgcccaggccctgactgatgcctgacattgattaattgatactctatcctagtgtttaacaagtgttccatccaaaaagtcttctgtaatatttaacttcacttccttcagcttcaatttctgcacaattcttttgtcgtctcatcaagagagctagtcagcagacagtaacaaaatgcttatattcatatacctgaaggatttttttttgtcatgcttcagccttctccagactgaagaaaagcaaataataaacaaaattaatcgttcttcagaaggcctgtttgactcattaataaataataagctttgatactgtgctttaagtgtttaccctttggaaagaaaataattttgacagtgatgtagaaataattatttgatatttatttcaaaacaaaatttatatccaatactaaacacagaattttgtaaaacaataagtgtataaagtaaaatgaacattaggattattgagattattgtagctaaaactagtgtttattcatataaattatgttaataaattgtattgtcattattgcattttacttttttgaaaagtagttaatgcctgtgtttctatatgagtattatataattcaagaagatattggatgaattttttttaagtttaatgtgtttcacatctctgtttcttttctctgcaccaaaagctacatttttgtgcccttatgtaccaggcagaaattgatctgcaatacatgtggagtctccaagggtatatttaaatttagtaattttattgctaactgtgaagttaatctgcactatatgggttcttttccccaggaaactgaaatagcagttcaagctaaacaaccggatgtggaagagattttgtctaaagggcagcatttgtacaaggaaaaaccagccactcagccagtgaaggtaatgaagcaacctctagcaatatccattacctcataatgggttatgcttcccctgttgtacatttgccattgacgtggactatttataatcagtgaaataacttgtaaggaaatactggccatactgtaatagcagaggcaaagctgtctttttgatcagcatatcctatttatatattgtgatcttaaggctattaacgagtcattgctttaaaggactcatttctgtcctggtgtgctgccatcaatacaaaagtagtcccaccttcaaggtagattaaattctttggggctttattgctttgcttgccagccttgatgcttttcatattgtttggtttaattcaaatcaagctactgcatcatagtgtctgtctccaacagctgtaaagaatcacaatatggtccgtgacctttcttttctttgttgctctttcttataaaagagtaaaatcggcattgaggcttcagtattttattgggtcaagaatttttagtgaaatgtcatgtaattgcttatttctttggcaaaaagctggcctgggataaacctttctacttttttttcttctccatatccatgttgaagtctaggtcacatttattcacaggctattacataaggagggagatggaaagccaggtcagttttcaaaaaatagctaatcaatggcttccatttgcaaatgagagtccagtgctaaatatacgttagcagtaggttacctgattctctgtacctgaccagaattataatggctcccattatgatgaaggttcctgagatcctgtaatcatggctgtttattgatcagtcttggtttctcagttaatgttgcaggcttggatacaatgaacctcgtcctcatgtttaaaactgcttgaaaacagttcaggtcaataacctcattatacagaaccagtttgtccttgcaaacaacattaccatgacttagattctgtctctaaggtcgctgcttagtttcccttgcgcttggcccaagcttcatttctagaagattgtttgttttccttacagcttacaagagacttttccttaggtagagttgaagtttgcacctgagcttaatgtccaaacaccagacactgaaaatcacaggtttctctgtagatatcaacatacttttattcagaaatatattgcaaccactccaaaaatctagaaaagtagtttgtatccagttcaagcccagtataatcatttttcataagctaacaatgtgctcagtatttagttggaagagctaggcaaagtcctgaaagcagcaaatttcagagtttccgttgatgttctgaagaaagccagccctcagagcagttaatatggtgactttcattgtagcaagccatgcagtgcacaaatggacaattgcatacgtttctatctactctttgttgatcctcaaagactttatgccttatggtgtatgactatgaattaaggtttgtcactaattgttagagatcacaaaggtacatgtaatttggcttttacttttgtgcctttgtaaaagagagagagagagatcttaattaaaagccactgagaaaatttttgctttcattatgtataaaacaatccaaatgcttgatgctaacttatcgcacctccacccacacactcaactactgggccacttggagatcagaactgggatctgccatgcctgagcatatctgcttcctgctgatgcattagtgatgtaaaaggagaattacttttctgaaataaaaagaaagaaccaggagctgttgctttccttctctttcacaacccttaaaaccatttttgtagcagacagcactgtttttttccttcctttttttttttctccttccctgtttccctattttctctcaatttgacacattgggagaagctgaacttaagggaaaatttattcctgtcttcccatttctcccttggatttggagaaaaatcaacatatcaagttggctgggcatggtggctcatgcctataatcccagcactttgcgaggccgaggcaggcggatcacctgaggtcaggagttcgagacctgcctggccaacatggtgaaaccctgtctctactaaaaatatgaaaatgagccagctgtggtggcaggcgcctgtaatcccagctacttgggaggctgaggcaggagaatcacttgaacccgagaggcagaagttgcagtgagccgagatcgcgctgttgcactccagcctgggcgacacgagcgaaactccgtctcaaaatatatatatatcaagttgataggggcaaaaatgcaagaatgatttgagaattatggggtttaaaaaaatagttgactcacgcacaacttttgctgtggaccatgaccttggaaacatctgaagattagctggggtttgcggtagcctgaaacacctagaggctcaaaaaatgacctcacagttttgaacatgacacccagcaatacaaggcagaaagctgtgagggctgtttaaatctctgcatggatcaaaaatttatttttaaaggttagagatgatttttctgaaggacactccattgctctgatagaacgtgaacaaagcctttttaaactttgagtccatatatcaaaatttaaaatttgtcctatttataatgcctcttcttcactctgggtcttgttacctcttaatagaagaggaaatgagtctgagtagcctgcagcacattttcatgagagaattgtgtttctgtttttgttttttgggggaggtgcatttggaaactgtaataattatgaagaaaatgatattctttaaaaagaaaatgaaaatctctcacgatgtatatgcaagatctagtatttaaatgcataattagtgtgtccaccgcttacaaacattctaattaaagacacatcagggagcaattctgtttcttaggaaattgacttgtctattggcacctccgcattctgcatcagacagcctgtctgtccagctcctacgctcacctcccaagctgagttctgattggaagctgggttcatccctgctcagtttctttcctctttcttctttccttcacttcgtcaacttctttaagatttcttttattttcaaagatggtatatttctggtttcttttttaaaatctctgactaaccaacttctttattttctttgaggacttcctgtaaaaggtcaaatacatattatgaaatgataatactaatgacgtataggtagtactaatctctgctgcaaaataactggaaaaatcttaggatcgtatgatcaaatacctctccatctttgtttagcacttcaactctctttctctctctctgtctctctctctctctctctctctttccctccctccctctccactctctccctctctccctctctccctctctccctctctccctctctccctctctctctctctctctcccccttcctcccccatctacacacatacttttatttatttgtatgttatttcttcatcttaacttcagaaattactgaagactgactatatgagttatataaattgtttaaaattttgctaaagttatagttttggtataatatattacattaatgccatagatgaaatagtctttaatgtgttccatttttccacacagtaataactaggtcctcaatagcaccccatttagcagtttaaaagcagcaaaaacaactgctatcagtaacaacaatataaactacaaaagaagccatttgttatttgatttttattataaaattgtatttttaactgtcttgagcttaagcatttaggtgccattttcttgtattcatactcatttttaacttaagttggaaaactacactttcagttaacttttaaaaatatgtttatgtactttcaatgcttacatcacctgccatgtattagaactgagagcattaatggaattttaaatgtcttggttactttctaaagtgataaaatgaagccagctggtttgctttgctaactttttatattatcaaaaaatgttacttacacaaacctagtaatatgttttacttactgctcttgaattatttttcaatgtaacagaaaaaggtgtgaggaactttctgtatttggccaaagcgttccatcccaacctttaacacaaaataattgctgtagacaaatggtcaagagggcaattataatcttccaggcatcatttcctcagatatgaactgcaaaatgacagcatcattagtcattttcaattacagtcagtcacaaccagggatgattcattttcccagctgttttgttgttaattaactagatgaagctgtttttttttctcccaatgagtttgttctactgccaacatcaacatcttaacatttttaaaaacttccttagggtttattttttgcctaacaatctttaatatattactcacaaaagatgtgcatctcaagatttatccacggtatagcaggtcaaatggtatttcattggtcgaaatgttgccgaaataaatataattacacttaaaacaatacttggatttcataaatcatctgccatgcgtacaatctcatttacctggtgtaacttcacttgtagcaacagaaatcaatagagagataacagacaaaaattgtcccctgaaatgaacaagtctattttgactgactcatttattgagcacaatttccatgccaataacaccagaataagttgggagaggacttctagaaagaagataacaatattagaggcatttaataatttataagtaaatgcatagcaacattttatttttttaaattacaagtttgcgactgggcgcggtggctcgcgcctgtaataccagcactttgggaggccaaggtgggcggatcacaaagtcaggagatcgagaccatcctggctaacatggtgaaaccccatctctactaaaaatacaaaaacaaaattagccgggcttggtggcaggcatctgtagtcccagctactcgggaggctgaggcaggagaatggcatgaacccgggaggcagagcttgcagtgagctgagatcacgccactgcactccagcctgggtgacagagtgagactccatctcataaataaataaataaatacaagtttgctttacaactgaaaaaaaagtcttggagtataagaggttgaataaatgctaatcccaatgcataaacttgaggagagcttcactttcccaatgagaagagaaaaaatttataatagatttttgggcaacttgtaaacataaacatttagaaatatggatgagattgtcaaatgtctaattatattcaatttcttaattgagtagcatttccatatttgcagtcttacattttataaaataacacactcatttagaaatacctggcacatttatattttatgaaacaatttcattcaaacccttcgtatgtatattctagaattgtagagctcatcaccttgctaagttatttgtaatatggcattgtttgaatccctacataatactctgaaagccctctggccaagattacaagcaacatatctgtaatcaaaaaattaagaatatttaccttattgcagcaagagcgtaaaacacttcagagtgtgggcatctcagtaagagggcattggaaaaagcttcttacagagttcagctggctgcatgattctaaggaggaattcagaaagtagaagccatttctggattagatgctttcaagaaacagagtcaatgtagtgattaggtatcttagtgtttatctagaagatgagattaaagtagggctagacacgtcgttggtaaaggagcagcaatgcctcatattagtcatttctgtgatagcagaaaggccttgtctctgtcttgtttcaaacacggccatggggtggccttgtgtctgcctagtttatttctatgagtgttttttaacatccagctgggaccatcatggcctagctagctgccagctgccagctatcagcagagctatttttcacgttctcaatgctgtcgctgaaatttttatcccaaacttcaatacccattcacaaaatattaggaaaactgtttttttcatttttcttagatatgattttggttgtttgtttgtttttgagacggagtttcgctcttgttgcccaggctggagtgcggtggcgcgatctcggctcaccgcaacctacacctcccaggttcaagcgattctcctgcctcagccttccaagtagctgggattacaggcgcccaccaccatgcccagctaattttgtatttttagtagagatggggtttctccacgttggtcaagctggtctcgaactcccgacctcaggtgatcaggctgcctcggcctcccaaagtcctgggattacaggcgtgagccactgcacccagccagatgtgatcttttaaaaattcccaatagactaacatattctttctgctttttaagttgtttggctttttaacaaattctttgaaagactcgtttacaatgatctctgccacgagtgattgtgaagctatacattaggaatgattgctaaagatttatcaactttctttgcctccctttttaattaagcaaattctgtcagaatacttatgtaagcatcacatctcttgaggttatttcaggctaatatacaacattgtggttccgaataaaataattgagacataagagatagtataaagtcttgaatatgagccaactttcttttctgagagaatatttgagtgaaaagtctcatgtactcagtagctcatgctgaaattagggaagcattttagagatttgaatttcacctcttgtcctcagttgtattagttacacttaaagagagagacaaagagacatagatgtttcagttacaatattcgaatgtatgcctgtatatatacagccgtaggtagagtcctttatttattcagtagatattaattgcatgccaaccattgacacaagatatatttttaaattttgaaaatctcaaactcaaatagagtttaaaactatattctagtttacttttttaaacaaatgattttttatgattgtattaaacaaatacattatttttccttacttattctacatcaaataatatctatttctagaaggcttttttccttgtcttaatgatagaaaacataaaaatcatttaatattttttaaatatccaaaaaatatgaggcaagaaagcagccacaattgtagctaccttaggaaacttaattaaaaaatttttttttatttttaattttatatgtgtataattgtacatatttatttgtgcggtacaagttatattttgcttattttttataatttcagtagttttgggggtataggtggtttttggttacatggatgagttctatagtggcgaattctgaaattttttatgtatccatttcctgagtactatatactgtacccaataaatagtcttttatcccttacctcactcccaagctccccacttagagtccccaaagtccattgtatcactccgtatgtctttgtatcctcatagcttagctcccacttacgagtgagaacatatggtatttagttttccgttcctgagttactttacttggaatagtggctgccagctccattcaagttgctgcaaaagagattcttttttatggctgagtaatattccatggtatatagataccacattttctttatccattcattggtcgatggacacttgggttggttccatatcttgcaattgcaaattgtgctgctatttttgtgctgctgctttcttttttgttatttccttttctggttttggtattagggtgatactgacttcatagaatgatttagggaggattccctctttatcttttgaaatagtttcattataattggtaccaattcttctttgaatgtctggtagaattcagctgtgaatccatctggtcctggacttttttttggcaatttttaaattactgatattcaaccttgctgctcgttactggtatgttcagggtttctttcttttttttttttttttttgagatggagttttgctctttcacctaggctttagtgctgtggcatgatcttggctcactgcaacctccaccttccagtttcaagtaattctcctgcctcagcctcccaagtagctgagattacaggtgcccaccaccacgcccagctaatttttgtatttttagtagagtcggagtttcactgtgttggccaggcaggtctcgaactcctgacctagtgatccacctgcctcagcctcccaaagtgctaaaatcacagacgtgagccaccgcgcccagccaaagcgttcagggtttctatttcttcttgatttaaactaggagggttgtgtgtttccaggaatgtatccatttcctctagattttctagtttgtgtgcataaaggtgttcatagtagtagtgaatgatcttttgtatttttgtgatgtaggttgtagtgtttccagtttcatttctacttgagcttatttgaatcttctctcttctttccttggttaatcttgctaatggtctatcaattttgtttatcttttcaaagaactatttgtttcatttatattttgtatttttttgtttcaacttcatttagttctgctttgatctttgttatttcttttcttctgctggatttgagtttagtttgttcttgtttctctagttccttgaaatgtgacattaggttgtcaatttgtgctctttcagaatttttgatgtagtatttaacactatgaactttcctcttagcactgtttttgctgtatctcagaggttttgataaattgtgtcactattaatcatttcaaaaaatattttaatttccatctcaatttcattgttaaccccaaaatcattcaagagcagatttcttaatttccatgtgtttgtatagttttgagggttccttttggagttgatttttagttttattccactgtggtctgagaagatacttgatatgattttgattttcctaaatttattaagactttgtggtctcttgtatgacctgtcttggagaatggtccatctgctgataagaatgtatattctataattgttaggaagaatgttctgtaaatatctgttaagtccatttgttctagggtgtaatttaagtccattgtttctttgttaagtttttgtttcagtgacctgtctagtgctgtaaatggagtattgaagtcccccactattattgcattgctgtctatctcatttcttaggtctagtactattgttttataaagctaggagcaccagtgttaggtgcatataaattgagtactgtagtaaatatcttcttgttggactaatccttttatcattatacaatgtctttctttatcttttatttacggttattgctttaaagcccattttgtctgatataagaatagctactcctgcttgcttttggttcccatttgcatggagtatctttttccgtccttttaccacaagtgatattttgatacaagcatataatatataatgatcaaatcagagtgattgcagtatctatcaccttaaatatttatccattttaaattttaaaaggaaagctatattcagaaatcactttttcttgtaactaattcctgttcttcataaagcagaaatttcatagtttgatatagttgtcttaacatttaatgaatattttcaagcaaagtatatacaatggagaataatgctcagctgcaaaagtcacctataataaatctgatttttccatttacaaacaaaagaattcccaaagtttatccattttggtagaacacgaattcactctgttgagtttggagctcttgtgcggaaaaccttggacctgcaatttagttagcatattcaaagttttaaaattatggagatgtagtcaagaataggacttgataactattatcccactgatacgctatttaaataagttgggatttaagtacttatttgatttccttaaatttgcttatagatgattaacatgtattgcaaattgttaccttttacagatttctattgagcactgcttaaattttattatatgatgaacacctgactagttgctacagccaaacattttttgttatgcaaatgaattttacagcttaattggaatgatgagagaattgaaaatatgggcaaatgccagagaagtgaaaagcaaaatgaagcaaaacaaaaaagaacttgtataatatataaataatccatttcaactctacagtacaccaaactcttgaaaaagtagcaagattgtttttgtgaacagccaaatcaaaaactgtagtcatttcataagtatttgctaataattataaaagattggaaattatacagttctgagcttattgaacctttgacccattgcagtgtcctcagacatttgtgatacattggtagtgccatttaattttaaaaatccacctctacattagagattatagtaacccctcatttacctatctggaaataagagtgggaaagataatattagagtaaatggacagactatttagagtttatgtattaataaaagagaaattgcatgtacaaacatgttattttctaggtaactaaaacctagtcctttaataaagcactgaaaaaaattttatcgtaactattttaatgagaacttttcttgaatatcttctgttttgcttcattgagcagcgcataatatctaaccaacaaatttatagtgctttgtagttcacagcatttttaccatataaaatatctcgtttagtttctccaacaaagctatgagttaggtggtattattatatccatgtttcaaggatgataaatcttagtgacccatctcattttccaaggatcacacaaccagtagtagtgaattaggaacgaaacctaagacttctgattctaaatcacaatgtaaattaacttttcttaattttcaggggtgtcgttatcacatcaatttttgctctgtttagtgatacagtgttatatgaggaacatgaaattcaaagcaccctttcttcagttgagacccagttgaagtggttaatttgcttttagaagctagactgtaagataaatacatacctttaagtattaaagctaactcaaatcactgagatacttacaccatgagaagagagtggaacctaagtcaactggtagaaacatagaaacagcaaactttgatctctctttatcctcattctgaggggcaatatgcttactgagtggaaagatgggcatacccccagcagtatttaaatcaatccctaatctatcactatctctccttttctctctatctcagcacatataggtgatttcctataaattaaatggtgtaggatgagatttcatcccatgttgaaaggtcatttcattgataaatgactaagattaccacatttctcagttttaagtttttcatgttcattgtctcctattgctactttctgttatcagaatgattacttctcattgcttttagtattctgtctttgtagggttacagaaacttcacagggaaaccagaagatcaaatatattactcactagtctcttagaatatttaatttttagtgtttaggttctgatgtcaggacaggaaaatatcttccgtgagtgatgacttccaagggtggttttcctgactaatcagaggcattattttttgtttgcttttgggttcaagactgatttttaataaataaaaaagttacatttattgatatgctagtaaatatttacatcatgcattctggataaaaacattgaaagccttgatttgacttgatgtcagacacaatagacatagtctcaagagcactgatgatagttaaattaggaagtgatgaattcttactatatattatcttttgttcttagcacagtttattttatatttataaaatttaatttatattaatggttatgtttaataaccgattagcaaaattactgaaatgtgacaataatatctctattcctgtttctttcctgctttatccttttaaaatatattatttataagtatattttaaatttataaaagctacattgtgctataaatcttgtttcttagcttttctaacattcataattgtgttttaaagatccacccatggccgggcgcagtggctcatgcctgcaatcccagcacattgggaggccaagatgggcagatcatctgaggtcaggagttcaaggcagcctggccaacatggtgaaatacaaaatacaaaaattacccgggtgtggtggtgcgagcctgtaatcccagctaccgggaggctgaggcaggagaatcacttgaacccaggaggcaaaggttgcagtgagccaagatctcaccactgcattccagccagggcaacaacagtgaaactccatctaaaaaaaaaaaagaaaaaaatccatccacattgctctacatatacccttatccatttctttcacatacatacccatgttggcctcaattccccacaatgcagcaacaaactttcttgtacttccttatgaccttaagaatgtgagagaaacttctccggtatacactggtgagggaatatgatcagcagggttttttgtttgtttttctgtgttttgctttttaacttatgcccacctttctgttggcagtcagcagccacatctgaagttatagctctctgatttagacaaggcttattcttccctttgttacaacctagtccctatagggacctgaatttgtgaccctagtctatgagattactttttaaatacagtttggttcaggatttataaaagcctaataaggctgggtgtggtggctcacacctgtaattccagcgctttgggaggctgggatgggcagatcactggagtccaggagtttgagaccagcctgggcaacatggcaaaaccccgtctctacataaaaatgtatgtactcagtagtactactcagtagtagtactgagtagctactcaggaggctgaggtgggaggattgcctaggaagtcgaggctgcagtgagccgagatcttgccactgctctcccgcctgggtgacagagtgagaccctgtctcaaaagaaaaaataagcctaataaaatgattgcacgcctggaaaacctacataggctccttcaagtcccatatatatataaagtcatccatggtatgtagttcacattgaagtcaagttgggggaaaagaaacttatttatctctttctcttttcctttattcaagtagcaattttcatttaattttattcaattcagaaatatttactgaactcctcttattaggaagcactagactggatataaagaaaacatcgtacaaggcatagaggactcagtcctgccttgcgaagggcacatagtctgactggaaagacacatgctgacagggtagactgtgttaggaataatgctcaaaatcctgaggacattgaacactcgaacaaaggattcttagcaaagcaattttacttctgcacagaggggtgcctccttggccagttgccatgagagcacacctgaacaaaggggcatgagagcctttattcctgacgcaagtcctgcccctgtaccctttccccccattggctggggttgggtcgtacaatctaaactaatcccagttggctaaacatttgatttttttagatagggtgggcacgtaaaatcaagtggagaggaaggggaaggggcgtctgtaatgagctagaaagttagtcctctttccaaataaggaaatgaatgtgagctggtactgaggtgtgcctgggcatctaacaaaggtaaaaaggaaaaaggagaaaaatcagggggtactatgaattaaagaataaaagattgatcagattatttgaagagaaacctcatcatatcccacaactggaagaaacaatttgatggcaagtttctcttcgtcgtttaccagctcaaaatctcaactatcaaaggcaagaaaaatacacacacacacacacacacacacacacacacacacacacacacacacccctctgcctttttctgtatggccaaagccttcagtccagctgaccacttcccactccagttaccatgttagcctcccaacttgtatctctgcacccttctgataaagcctccacaatgcaaaacacgaatcgtatcatatggctcttcttctctaaacacttccatctactctgtggttttagaagagaatgtaatagtcccacattacaaggtcttaataaattgcattcttgcagctctgtatcattacttgtaaacactgtagtctagatagccaggacacactgcatttcttttttaaggctcgatacctcttgccattttgcacgtagttttccttctgtctgaaatgccctttttccacctggcgcttgaatggccccttctgaaaacttcctagtcgtctttcaaaataaattcaaatgttagcttttgtgggtaacctattgacctctccaggctgagttaagctgttcccccgaggtgtcttgttgaaatcattattttttcctaaaatctctgttctaatttacttacatgtctgtgaatgcttagaggttacgaacttcagttttgtaagcttagtaactggcacaaagtctggcacagagtagcacctgaacaattatttttctggaataaataaagtaatggtttcattgaaatgattcgcattaaattaatgattagcattaaactacaacgtgtatatgaaacattccagttaggttgggttcattccattcctatttaaagagtttgtagtttctggctcttttccaactctgattcttcagactagaaatgcaatttctgctaatgtatttattttaaccaaacccgacatcaatcaagttatttgtattcctcataaggtaagcataggaatttacagtgatacaaaaacgcagctattatctcttataggcactggtaaagcttttgtgactagtgctactatactggtaaggtattgctgcttgtaatgaactaaatatttcagtggcttaacacaataggagttcttttcttgctcacatgacaacccagcgtatgttttcctagtcaagcagctttcttacatatgttattgcagaaacctaggtcctgttcatcttcttcctctgcctgccattcccttggtagcttttctctgctcgggtttcgcaagaggatgaaatcctattgaaaatgatctgagggtctattatgttctcaagaatggtacatatctagtctatgataaatgctcaggtaactgattaggtgtaatagatatcttaggattttgtcatgaacaatcagcatcaacaccacctggaaaattgttaaaaatgcaaattattgggctccacccagtatctactaaatccagaactccggggctaccatgcagcaattagcaaggtctccaggtgattctgttgatcctaaagtatgagaacaactgccctagggcgttaggacttaattctctcctcagtaagttgtaaagatttgccgtaggacctaagagtcttctgcttccagcaatagaaaggaaaaaaaatgtggaaacctcactaaatttttcaaagcctcagccccaaactgacaaacaacacttctgctcacattctgctggctataaattatcgtatagctagctgcccagtgaagtggaaccagctcaggacggcctactgttatattgccaggcattttttgagccacttgatgttatcttcttggtaatttaaatttaaccgtggtaggaatatttacaccacagaaattggcaaacactaaaaacaaggtgtttttaaacaccctgagatcagagatccagttgatatacatctaccagcacaccactggccatatacaggcttgccttatgccacggggagctctgcagctgaagtagcccttcaaacttgtcctgctttgagccaaattaggcctctatactttcaccttcatcagtcactgaatgagggctgcctggggaaaggcatgaacttggacaaggcagctctctgcagctcaggcagtccctgaagggactgacagttgaagaatgtctactgacatcatttccatcatctagaacaagagtctttctttgaagggggctctgagtagcatattcccgtgtccactgcagcccctccctttaagagactctgatataattgactgggggtgagccagtacattaggattttcctaaagttatctggataattttagtatgcaaccacaatagatactcttcaagaattaagctagttgctgagagggaactgttttttgttggtttgttttcactaatgtttgcactctacttcctttaaataaaattatgcctggagaaagggtttttgtatggagcaattgataaatatttgtagggtggttggctaaaataattataattcctttaaaagaaattctacccactaaagttaatttagaagtaaaatataatagaaatccaataatatattcaccaaatggattaagatgttcatgaattatcttcaaagtgttaatcgaataagtaatgtgtatgcttttctgttaaagaggaagttagaagatctgagctctgagtggaaggcggtaaaccgtttacttcaagagctgagggcaaagcagcctgacctagctcctggactgaccactattggagcctgtaagtatactggatcccattctctttggctctagctatttgttcaaaagtgcaactatgaagtgatgactgggtgagagagaaaatttgtttcaattctaaagatagagataaacctttgtgttattgactgtgcaaaaagtcttagagtacattccttggaaattgactctgattcaaagtgttgcatgacaacgggatatggggagtgttctctggagatacacccacaaggaagagaagagcacaagggagattgtgggagagtctgaaatgtgatttgtctgcagcagaggcctaagccagtctcgcaggagccctacatctgggctggctgtgcagagctgtcctgaattgcaggcagtgggcctggcccttgtattcctgatccagccagccattggccaggggctggctgctgcctgagagtggaaggacaacttggacaagttttctgaggccgaaggcaattcttagtaaggaacaccattaacaaccaatattcctagcatccagggatgtgtgcattgttcctgaagagggacaagtatgtctacaaaaatcacagaaaccacagaaacacacacagtcctactagcacctctccctgtcccatttgcaaacaatttaagagctctcccatttttagttcaagaaaaagaaaaatggattgggaggaccacaagctgacttgggggaggaatatttcctcatttagctgtagttttaacttttgttttcactgcatattttcagtctattttattttctttcctcttcagttgttgatagaaggtattcataaattctcatggcaatgttaatgctggctttgactctcaggggaaagaggccagaaaacttctttgctgtaccattccataattaggcagaactaaaaacatctttgggtgttgttttttgtttttgtttttttttttgccttgtctgcttttcaaagatcaaatgattgaagcattaaagcatggtgactggttcttcaggtaaagttgatttttattttatgtcaagtagaaaaatactgaactggaagaatcacagctggggtagcacaatcataattcattagaaggcataaatagtgcttggattaaaagaagccctacaatctggggacagtgcatctcatgtgccctctgggattactcggcagtcatcagagttagatttaacgactttggagacttaagcattatggttttttttttttgtcaatctgggacactgaaattgctgtatcagggttatactcaactgtgtcaggtttatttgtttttatgagctgtaatttttggttccctcagcgcatatgcatagtttgttcctatgttatcatttattggtgtctgttttctggctgtctctggtaggttcagcctcagactctgtaactccatgaagagattatgttccaatgatgttttataagtttgttaaactctgaactcatgagtttatgtcccatataagccacgttacacatggtaggaaggctccaaaaccagggcgccgaaatccatttaacgtgtaacttacctaaatgtaacaatgtttataagaaaaatacattggaagttccagttttgacttccagcaacatatataattcatccactttatttattaacttccatgtgttgagcatcatactggtgctgcgagtacagcatagaataaaagtctctcctttcataaaacatatattgtaattgaaagagaaagacaataaactaatgaagaaaatatatactgtctcaataattataagtgctgtagagtgtagtctacagattgatgtcaatgggtatttgttagacacacagaatctgaggcccctatcctagacccactgaatcacaatctgcattttaatagaatccccaggtgaatcctgtgcacactgacatttgagaaacaccattacagagaacaactaagcagggagatgggatgagggtattattgtctatagtgtggtcagggaagcttgtctgttaagagaacatcagaaaactgatgtaagtgaggaagtgagcctggtgtatttctgggaaaattattccaggcagggagagaaaagactgagcaacgatactgaagtaggaacaagatgacggaatattaaggagatcagtgagactagaggagtgggtcaggggaagtgtgatggaagccatgagagatactcatctttcatagcactgccctacttccttctccccaacatgagggtctcatcaccccccaccactcttgtcttctcctatgtcctccacattgctgccagtatggagagtctgggaatgccctcagctcaaagctgtttggtgatagctggcagagttgtggtagtagctaaaaaagaattaagggaaagaggaattttctcaaaagcaggtgcttttcatcctctttagcaaaccgaaacagatctgagcattaagtcaagatgttaaatacacaaatgttgaatgaaaaaaaaaacaaaaggtagtcatttaaattcagagctgcttttattaaaataagattttcttttttctttactgtggtagttcaaatatcagaataaagaattgtttctattcccgacttcctgacttgcaggaagttaatcagaaataaatgcaatataaaaaaagaaaatctaatttgtattatgcttcttgtatatgtttattatttcatgtactgtattacaatgtaatagaatttataattcattatagcagattgtttccattgcattcctactattaaatatgtagaagctacacatatacttgtagctttaacatatatgtctttatcctcaaaataactgcaaagaacatatagataatttttaaagattaaggagcctgaggtttagaggggagatagctagattaaggccacacagctagaaagcaagcaagcaagggtttcagtccacatgtcaagctccacagcctgtgttttgttttgtggctgtgctttacactatctctctgtccaagaacctaatggaaaattacagatacagatgcagctggccagcagttaatataatttaactcaatcttaaatttatctggagtaaaagtgatacaagtttccgtgttttttcttttctttctttcttttttctttgtgtgtgtgtgtgtgtgtgtgtgtgtgacagaatcttgctctgttgcccaggctggagtgcagtggtgcgatctcggtttactacaacctctgcctttcaggttcaagcgattctcctgcctcagcctcccaagtagctgggatacaggtgcgcaccaccatgcccagctaatttttgtagttttagtaaagacggggttgctccatgttgatcaggctggtcttaaactcctgacctcaagtgatccgcctgcctcagcctctcaaagtgctgggattacaggcatgagccaccttgactggcctgtttctgtgttttttctacttaagaagtagaaaaaattggttcactctatttgaatttcttagaaccatagaaatccaaacttggaataattattgcaattattatctagttgagtattcttcttttatagatgtagaagctgaggcctaaagttgcttgttttgttttatgaacactaaaccaaactaccttgtggctgcttacttaaattataaattataatggggtggccttgcctgagctgtataaattgttttaattatcaggacaaatcaacatactggaaaaaaaaagcaaaacttgcaattgttgttgcttagacacctgtccatatcagtttctattgttgcatagaagcaccccaaaacttaacagttcaaaacgagtgatttattgctcataattctgtgtgtctgaagtttgctctgtgattagctggatagttattctgatggtcttgcttggtgttacttatgtggatgcagttatctagcaagtgaacaggagctagatggtctaaaatgcactctctcagatatctgacagctggctgttggttgcagaaccttgattcttcataaggccactcatcatcctgtaggctagattaggcttcattacatggtattctcagggcagttttccaagagagggcgggtggaagctacaagaccttctgatgcctaggctttgaaacgtgtaggttacttctgctaagttatattggtcaaagcacctcaaaagatcagcccagattcaagagatgaggaaattacttcatctcgtgaaaggaggagatgccacatcgcatatcaaaggggtatgcatattggggatagaaggttttattgtcaccgtatttatacacaaatcactacattggggaaaaggagggaaactggagatcaaaagtgttggtcttaatccaacttaattctcaaaaattaccatgcgttagaaccacccagttcttcgcaaagtatagattactgggcttcaaccccagagtttctgatttactagctctggggtgagacctgcatctctctctctctctttttttttgagactgagtcttgctctgtcacccaggctggagtgcagtggtgcaatctcggctcacagcaacctctgcctcctgggttgaagcggttctcctgcctcagcctcctgagtagctaggattataggcacccgccaccacgcctggctaatttttgtatttttagtagagacagggtttcaccatgttggtcaggctggtctcgaactcctgacctcaggtgatccacctgcctcagcctcccatagtgctgggattacaggcgtgagccactgtgcccagccaagacttgcatctctgaaaagttcctaggttatgctgatgctggcctatgctttgagaactactaccacagacatacagtgagtggggaagaataaattcatcccttctgctgtgtgcagcaaggagtgggattccaatgagatccagtgctgtgaatgctaaagggaaatccatcttattttagcacctctactccccatctccccaccccgaggatgttatagcttagaagttcaaggagatggacaacacactaaaccaggcagtatttgccctgcagagctgttcagtgttcctggatgagacctctgagaagaaaagccataagttcctctagagactttcacaatcatttaggtagacaggactttgcatgggtctgaaggcttgcatggcagatggaggcaaagagccagcaaatctggttgtaaatgtcaatgtgaatcctttcttatccacaagctgctgggcctgagaacattaatgttctacaatacccgatttagcatttttgaaagaaattgcatatagacatgcttaatgtgaagactccaaatcaggatatttgattcaaatgtctcttggtaataactatggaatgaataacccattgtatatggacatatagaagagccagttaacagagttttctttttttttttttttttttttttttttttttttgagacggagtctcactctgtcgcccaggctggagtgcagtggcgcgatctcggctcactgcaagctccgcctcccgggttcacgccattctcctgcctcagcctcccccgtagctgggactacaggcgcccgccaccacgcccggctaatttttttgtgttttttagtagagacggggtttcactgtgttagccaggatggtctcgatctcctgacctcgtgatccgcccgcctcggccttccaaagtgctgggattacaggcgtgagccaccgcgcccggcccagagttttctagttgattaaacactggtaaaatcatctcttcctgtaattaagtttggagagagcaagtctcaagtgtaattaggaaagcacagtattggaggtcaagaagcctaaattctgatatctcagttgtgctaccaactatataagggatcaacagactgtttctgcaaaggaccgatactagatattttctgctttatgggtcatgtggtcaactctgtcattgtatactaaaagccacagacaatacctaaataaagggacatggctgtgctccagtgacactttatttacagaaacgaggcaggtaagatagatttgacccttagtgggctacccatttccccttagcactcagccttcctataaaccatgaagcgtctaactacaagtacctgtgagtcttcctgagtcctttctctgcctgtaggagtagctctcccacttgcagagcaggctggaagctggggaggagattatctctggaatagcacttaaccaatggacaaaagctgggggataaaggtgttggtcttcatagttttcatactgctatgaagaaatacccgagactggataatttatacaggaaaaagaagtttaatggactcacagttccacatggctggagaggcctcacaatcatggcagaaggcgaaggaagagcagaggcacttcttacatgacagcaggcaagagagcatgtgcagggaaactgctctttataaaaccatcagatctcatgagacttattcactatcaggagaacagcacaggaaaaccccacccccatgattcagttacctcccacatggtccctcccacaacacgtggggattattggagttacaattcaagatgagatttgggtgagaacacagccaaaccatatcaataaatatcccaccttcttctccccttgggtaggacacctccaatgcatgttccacactaaaaatctccagtgaattgggcagttgaccacaatgataagcatacttattagcatgcctcgtataggcttccttccgatgtgtaggctttcttcccattttggcagaatctggacccaaccccacatctcctgagtttgatttcagtcctcttcagtattctcatatatctcaactttgttccctgctgagatacaactgacagatatatatgtatcttcagctctgcagctctatcttctcttctaccatggctttctgggatcagctcccaattgaattatttgtatttaaatccttgtctcagggtctacttctgagcaaacctaaattaatacaagtcttagaattagtgccacagttataccttttgagtaagttatgttgcaattcccattttatagatgagataaccaagggtcagaaaggttaaataatttgtccaaggttacagagctagtcagtgacagagtgggtattcaaaaataagtctctatgattccagagcttatgctattaatcagtgcaccatgtatcaagcagtgatttagttatcttcatttgaattttttgaagtctctatttaaattgaatatcaaatcctcacatataaggttatttatacctttttatttgttttatttatttatttatttttgcttaacttttttttattatactttaagttttagggtacatgtgcacaatgtgcaggtctgttacatatatatacatgtgccatgttggtgtgctgcacccattaactcgtcattgaacattaggtatatctcctaatgctatccctcccccctccccccaccccacagcaggccccagtgtgtgatgttccccttcctgtgaccatgtgttctcattgttcaattcccacctgtgagtgagaatatgcggtgtttggttttttgtccttgcgatagtttgctgagaatgatggtttacagcttcatccatatccctacaaaggacatgaactcatcattttttatggctgcatagtattccatggtgatttatacattttaatttgaacttcactcacctctacaaagttaaataaagcattccatttccatttcaataatactttaaatatctaggcagttaaagcatgaggttacttggcacttaaatgtactcttgtcatactacttttgttggcttaaattgcaaaaaaaaaaaatggttaatttattgtgacaataccctacatttatctgcagtgatcattttttttgtgaaaatggccttcgtttatctgcagcaaaggaaaaagaggatggcaattagttcttgcattcttattcctctcttgggtcctgatccttctcattaatagaaacatggcaggggaggggtatataacccacaccctttcctgttgtggttatgtttccactgttgattctgcttcaggtgaacctttaggattaggcaaataaatttccgtgaggccaaatctttttcttcctcattaacagatgatttctctgctaaaaacacttacgacatggctatactattgccggttttatagttacaggctctaaaccttgaaaacttcctcaaagtctaatacgtcaggagcaagcttttgtacaaaaaatgtgaagacccttaatcagttccaataacaaaataaatccattttaaaccctatcccaagatactgcaaggccttggagcagctggagagactccttaactcttgacattaattaattaatttaaaaattcatatttgtatgtatcagtgaggtaagagtgcttgaaatataatgagatgtgtcacactgtagaaaggggagtgacaacagaaagccctggctggtgaggccccagcacttctcacactcatcagaaggaagtctttccatgaaggcagtagggggtccctggtcccaggccaggtccttcaacaatgctcactggttaacaggaaaggcactacagtggcatcattgttaacatccaagacagtgatagaatgtgaaacttctactgtttagtatttagtattcagcatttagatgttaattatccattttgtgatgaagttccctttcttctccctctcttaaccttttggtagttttattgcatggttaccatttccagttagggttgtgctttggggtctgaactgatgaaggaagagaaactctagttcatcatttctaggaaaaagagaaggctaacatcaattctgatgattagagattttttgattacctatgtcctgcattttaacagaaataaaatgttaattacagtaaacttactttaaccttcttatgctatttaacactcttcaagaaaggacttttgcttgaaatcactacagagtataccataatcttgactgtcatactctgaccaagaaaccagaactatttaggcatatttatgagagtaagtaccctaccgctcaaaatggaaggcttcaacatgtattcctaatatttcctaaaacttcactgaatagttttaaaattgaatataactttaccttcagagagaaacaagatttcgaaaggaaattgtagcagttttgtacttcaattgtcgattttaagattgtggtctgaaaagtatttgaacagtcattctttcttttccactatctcaggaaaggctctcattctattagaagcaatcttagaagcgtaactgccaactctcttcttaaaaagtgaagagcagatggagttctaccaatctgctatacttgacagtttttcaactacctaacctaagttccagttactgtctaaattatttttattcgaataggaaaaatacatttatgcttactgtacatttcgacagtgttcattctttgaggtctgttatttaatctccttcccacttttcttttctatcttaaatcagatgagtccccatggtctggcaacaaaacagctgtttctcaaatttttaacgtctctgtggccctcctcctacccttccaagtgttttccatactatttttctgttgtgggcttcagaattggatgctgttccataattactggtcttcccatgactctgtcacatcataaagtctatatatacccttttcctacgtttacatgccaaataccaggtgtgtctagctttaattcaatgactagcatatggtaggtattgcactaatattttttggtcaagtgaacatatattttacagatagatcaaatacatcaaccttcccatgtaataataataataccaagaagattaaatgatcgcgtgcttgaccagctgtttagtggcagaatctggacccaaccccacatctcctgagtttaatttcagtgctcttcagcattcttatatatctcaactttgttccctgctgagacacagctgacagatatatatatatatcttcacaatctcagtagtaagccctatttttttaagattacagtgctgatcaaagagggatattctatggcattgatgcaaatcttccaggccagatataacccctatctccttaaaccctcattcttgactgtgtcttgaaatcaaatttgagaacctctgctttacatgctaccttcctcttaaaattcataaggtttattccttctctcatcttcagtatttttatgaaaatatgttttactcttatttccaaagtgcttgccagcccatgctgagttcattagacaaacaatctaggtatcctaatatttaggtaaaattgctagcagcactaactataccagtacccacttaaattgcaatataaacctacaataggaaaaaaaaagtcaaaattatactactttcaattcctacttctggaataattatcacaccttcaaaaaaactcataattgttctccaatattaaaaaccaggaactaaattacatcactatatatatatagctatatagacatataactgtatatagtttatatatatattacatgtcactatatatggttatatatacagatagctatatctctatatagtttttatataggaaactatatatataaactcatatatatttatatataaactcatatatatataaactcatatatatttatatataaactcatatatatttatatataaactcatatatatataagagattttatatgtatatatgagagacaatattgaaataaaacaaactagccaatctccaatgtcccttcattttcccaggactcttctttattctcaaagaaatgtatgaatacacaatataaataaatgttctataatgttcattatggattataatagttttcttgtcatactgaagtgaatgggaattgtttcttcgattattagcatacttttcataactatgtgatttggtgataggcacttttgcttactaagttcagcatgatcaaaacagaactcctattatttttattgttgattcttatttctttaaggtaaaatatgcccttttcctttgaacctgcacactgtttaacaaataagcacataactcaggattgaattgtacacttcgatttgagcttttttttcaaggtcaggacccagtttcacaagaagttttattttttccaatacaactgacatccactcccaccagctgaaagacaagaaaaacttgtctaataaagctttcagattcaatttgctgcctgcatacagcttgaggaatctctggaggtcactcacagcatgtgttgcaaccccaacagggagaagtaatgaaaagattctagttaaaaagctgacactgccccttccaacctctttgaatgtgaatataataagccagtttacagacgcaaatctctatgattctggggatttccatcttgatctctgactccaaggaacatttgaatgcatggatttgtatccattatctgggtgaataaatgcttcatattgaaaaaaggggtgctttaacaacataagtctgatgtaaatcaggcaaaacaacattgtcacttcatgtttaactctcctggagggtctctaaggtctcacagtttggttctattccagtaatatataggcctatcatagccattttcaaaaataatacctgctttcatttcgattattccccctagcttttgcattgacccgaacatacctaatatttatcttagggctaacacgcattaatgccttgctctgtaccaggcattttgccaagtattctttgtgcatttttctgtttaatcttacagcagccttatgaaataggtactacattattattatttttcaccatgagaggaaatgaaagcctagagagaatggttatccaaaaacacccagctactaagtgggcacagcatggccttgaacctgagtctttataaagttcatgcctgtcttttacctttatgttaaacatactgaatcttggtcatgcagtctatgaatgaagactccatatactctaggaccaattctaccatattgtgcatgcttttgtacatattttccaaatgaaattaaacaacaatactctctcttcccctttcttttccgttttgcatgacatctaaatcttttattaaatctccgtgggtggaattgggccttaagtagtagtacctttgaagcttaatactataacctcagagttacggaagtggtttcaatatgaagaaatatatacgttcttttcttttcttttcttttctttttttggctcctctagaatagaaggcaatcaggagagaaaaagacattaagatgataggcttgattctcccacagtgttactacttagctttatttattctcccacatctgtaactgtcaattcaaggtcaaaaagccagtacagcagcagaattacaaaaagtagatctggaaaatctatagggtaccatagtccagcaccctgctgcaagtcaaaatcaattaaataaatatgtttaaacagcacttcatttaatcttaagggcaccacgactcccttggaaaattcttttttgtgttcagacctgattctctgaaagtattttctagtgttttctttgttcggtggctgtggtgaataagtggacccaattgcctacagcatgaaatcgtagaaatgaatatgggctggaacttcaatcaatcacacaaaccagaaacatagagttcatcacctcttctggaaagcgtccccttcggccgtcaaaagggtagagtttcctccaacatatgttcatacttccctttgcctcccatctgcaatttcaaccagtctgttgctctcgccctttttaggcttcacataccggatttcttcttaggagctcacttgaaaaaagggttgtatgctttaaaaatactaaaagtcactggactagatgataataaaatttctgtaaaataaaaagggagttaacagaggtgttaccacttatcataatggatattgttgacctttcctctagccagtgtcccacttaagcatgcttcttggctggaatttatttttctcatctggataaatctgaagcattatagtaaaacccagtgtgagcaaggccatggatgcaagtggattgagatgaatgagtggatagacctgcgtgggcagaaataatgaggtcagcaataagccataccaagggatgcacactcaaggaataaattggaggtagcagaataactgaacaaatgatacatttgatcagactgtcacatgaatatcaactgaaacaagttatgactgtagttagtgaaccctagagtgaagaaaacaaaatattgaaatccatctgatcaaaaaataataaaattgtttacatgtatatattatctaaaatttcccttaagaatgaagattataaattcccgcagttgaggaaactgaataagaggagaatcaggacagaatcttttctcttcgtattcctagtccatttttcttctaactacagtagtgagaacaagaatttattcaccaaatcataatacattgcaattaggggatgccatttgaatcttggaagacacgatttgaggcaaataaaaaatccatatttataaagtcaattattggtttatataatttactgtttcagcgggaggtataggttagtaatgtaagtcacttcaagaaggttttggtcgaagttttgccaattttttctgtaaaaagccagatagtaaatattttgggttttacaagccagaagatctttgttgaagttactcaactctgctaatgaggtgcaaagcagccataggcagtttgtaaatgcataagtgtggctgtgttccaataaaagtgtgtttgcaagaacaggcagttggttggatttggcccacaagccgtagttcactgacccctgttttagataaatactagtcaatagattccttgtagctaataaagggaatatagattgtttaatgtgtttccctaatcttcttaaggcttcctccaggggaaaaaatatttcttatcatcagcagtgttattaatgcttactcagaacaaagaataccacttacttagcatagaatggacatttataaagccactcatggaaagaataaagagatgtgaaatacctggtacaactcttaagagtgttccactatcatttgaaaaaatgatgagtagtagttatataaaaggactcgagcctaaaacatttgttctcactttggataacgttttcctatctcagcatcaaaaaatacaaagaaaggggataactaggtcttagattttctaaattctcatgactataagtcccatatatttagatattgaagtacccttaaatatacctaagtagaagtaataatttcgatattatgggaaatctaattactgctcatagttctcgagattaaaatgttatacaccacatctcagctttctttgaaacttgaaatggcatacttgtacaaaggtagaatggtctcccaaagcagcgtcatagattagcagaaaagagctatgataatgccacttcaactgactatcatttaaataatgaattagttaggaagagttaaattatatagttacaggcagcaggagatgtcaccatcagggggataagaagccattttccagtacactatttgacttaactggtgcagttccttctttaactgtaggttactcatttgtatccttaatttatcaatatactaatctgacaaataatttattaaggattactgtgtgccctcctgtgtgttagattctagggatacaatatggatcaagataagcgtgattcctagactcctagaaagtaagaaaactaaataactgtacgtgacaaatactaggatgtagaatactagggaagaatcaggaagaatcacctcacccagtctggagtattgcaacagagcgatgtcagaggaaaaattctggaaaaaaaaaaaaaaaaggaaatttgaagatgagacttgaaggataagtaggtgtacctaggcaaacaagtaggggagagtgttccaggcaagagaaacaagtaacagttggaggcaaaatggagcctagcacgttttaaaaatatcagtatggctgaagcactgagttggggttgggaatgggtgaggagcgatgtgtcagggaggacattccagatgatgctggaaatgcatgcatgttcgcaaactgcattttaagacatgttagagaaatcaaacacattttatttgaagggtaattgaaagccactgaagcattgtagagagactagtgacatgagcatatttgggttttagagggattactctggctgaagaataggtaactgattggataagagcaactttggaggctattccagtggttcaggtgatagataataatgacctaaactaaagaagtaataaagggaatggagacaaagtagacagattcaagtgatacttggcacgtggaaacaacaggccctggtaactgattggacataaaatggagagatacagagaacgcgaatagaacacccaggcatttggcttgataaaccgagtagaccgtggtagaaattactaaactatggagtattttagggttcaggggaactgtgagttcaattttagacatctagttttgcaaggccactgaggtaactgagcatatgagtcaggagagaagtttaggctaaaaatatggatgccagagttaaccagcgttatgataaaacaaagctgaagtctcgagggtaagaacacctaaacatctaggctggagaaggcagcaggtaaaaagtaaaaggagaggccaggcacggtggctcacgcctgtaatcccaacactttggggggccgaggtgggtggatcacctgaggtcgggagtttgagaccagcctgaccaacatggagaaaccgtgtctctactaaaaatacaaaatcagccaggcatggtggcgcatgcctgtaatcccagctactcgggaggctgaggcaggagaatcgcttgaacccaggaggtggaggttgcggtgagccaagattgtgccattgcgctccagcctgggcaacaagagtgaaactccgtctcaaaaaataaaaagaaagagagagagagagagagagagagaaacagagaaagagagagaggaagacaaagaaaggaaggaagggagggagggagggagggagggagggaaagaaaagaaaaggagaaaaattcaggagaatggttacttccagggagatggaggcgattgtgctgtggggaacacaagggtggggtcaaggtattagcagtattctatttcttgattggggttgtatttacataaagtgttgctttataattattcttcacactttatgtgtacgttctatgtaatcatctatagataagacagatttcactgtaaaagaaaataaaagcttccaaaagattatcatcacaattgtaacagattcccctggtgcctggagtcacacgccattttcctgcactgcagttgcagctgcagtggacagccctgtgtgagttcagacttgcctttagctgacagcatcccatgtcaagggaatggctcccatttttctactttctatctaagggacttctctgacatcccaggagcccacagattttgtgagctttctcacccttgaagttttagtgagtgagcaaccttcaaccaatggagatgggagcccatggatatatttttaaccactattccttccgggggcaaggggaattctctgtgattctcaggaacatacaaaagttctgtcaaaatacagtccccatggtccataagcattaccttgatgataatacatttgattggcatttcctccccctctgtctcactcttttggtttttcattcttgcttcctagggatcagcttccaaatgagctatctgtacccaagtcctcatccaggccctgttttcaggggacccaaagacaacaataagaaaaatggaactgaaagaggagaagactttaaggcatgaaaaaagttcctctgtattccatactgcatatttaactgcctactcaacagttccacttagatgtctcaaaaataatctcatgatcttttactgctatgaaatgcatgaccttcccctgatatattcctttcttcaggttttgtagcaccacttagctatccagtaacaaaatcttgggggtcattcttaaaaccttcccacctcacccctgctggacatccaccactaagttcagttgatttttttgctcctaaatatttcttggttcagctttcatttttagatttatcctgcatacccctgtacaatctcatcatctctttcctggactgttacagtagtcttatattaggatgatcatagtcttgatttgcctagagaaaacatgctttatgtcattgcctcagagtgactaatagtcccacctttcacttgtaacactatgcaggttattgggttaaataatactgtcatccaaacctaatctctcctcattcatttcttctctcctatgcatcttagctgtgtgaaaattcaaaatataaatttgatgacagacagaactctgtttaaaatgctccagtaccttaccatttatctcaaaataaaaatttcaaaaaaagaaatgatatcccacaggatcttgtatagtgtgaccctttccatttcatcatccttataccagatactgtgaactacttactctcttatctccacattgacctccctcctagttttgttttgcttatgaaagtgcttattttctgttttttaaagccattgcacatattggtctctctgattgagacactatccttttgaatttttgacctcatacctactcacttttcaggtctcagctcaaatgttatactcaggaaagacgctccttacctcccaaactaggttagtgtaaatggcactatttatactcctcttccagagcacacaccaaatcttatatttatttgtgggacaatttgaattcatgttgttccccctactcaattgtgagcttcttgaggacatactctgcctcctccttacctagctttattgaagtataattgagaaataaaaactgtatgtattcaaggtatacaacatgatgattttatatgactatattgtgagatgattaccacaatcaaattaattaatacatctagcacaagaaatagttactattgtgtgtgtgttgggggggggggatgaggacacttaagatccagtcttgtagcaaatttcaagtaaacagtaaagtattattaactatagtaaccataatgtacattagatccccagacatcttataactgaaagtttgtgccctttgaccaatgatatggtttggctgtgtccccacccaaatctcaccttgaattgtaatccctgtaattcccatgtgttgtgggagggacccagggggaagtaattgaatcatgggtttgtttccccccatgctgttgtcgtgatagtgaatgagttctcatgagatctgatggttttataagcatctggcatttcccttgctggcactcattctctctcctatcaccctgtgaaaaggtgccttcctccatgattgtaagtttccggaggcctctgaagccatgcggaactgtgagtctattaaacctcttttctttataaattacccggtcttgggtatttcttcatagcagcatgagaacggactaatacagtaaattggtactgcagagagtggggtattgctgtaaatatacctgaaaatgtggaagtgacttggaactgggtaagaggcacaggttggaacagtttggagggctagaagatgacaggaaaatgtgggaaaatttgaaacttcctagagacttgttgaatggttttgaccaaaatgccgatggtgatgtggacgatgaagtccaggctgaggtggtctcagatggagattaggaacttcttgggaactggagcaaaggacactgttgctaagctttagcaaagagactggcagcattttcccctggcctagagatctgtggaaatttgaacttgagagagatgatctgaaattggaactttgttttaaagggaagcagagcatcaaagtttggaaaatctgcagcctaacaatgtgatagaaaagaaaaacccattttctgagaaatacaagctggctgcagaactttgcttaagtaaaggagccaaatgttaagcgccaagacaatggggaagatgtctccagggcatgtcagaggtcttaatggcagcccctcccatcacaagcccagaggcctaaaaggaaaacatggtttcacgggccaggcacagggccgtgctgctttgtggagtctcaggacttcgtgccctgcataccagctgtggctcaaagaagccaaagtacagctcaggctgttgcttcagagggtgcaggccttagtggcttacatgtggtgttgggcctggggttggacagaagtcaagaattgaggtttgcaacctctgcctagaattcagaggatgtatggaaaagcctaggtgtccaggcagaagtttgctgcaggggcagggccctcatggaaaacctctctgctgggacagtgcagaaggaaaatgtggggtcggagctccacacagagtccccactggggcactgcctagtggagctgtgagaagaggaccaccatcatccaaaccccagaatagtcagaaatgctgatagtttgaaccatgcatctagaaaagctgcagatactcagtgctagccatgatagcagctgggagggggctgtaccctgcaaagccacaagggcagagctgcccaaggccatgggagcccacctcttgcatcagcatgacctggatgtgagacatgtagtcaaaggagatcatttgggcagttcaaagtgtaatgactgccctattggatttaagacttgcatgtggcctgtaacccctttattttggccaatttctcccattcggaacaggtgtatttacccaatgcctgtaccccccattgtatcctggaagtaactaacttgttttggattttcaggctcataggcggatgggacttgctttgccttagatgaaactttggacttggacttttgggttaatgttggaatgagttaagactttgggtgactgttgggaaggcattattgtgttttgaaatgtgatgacatgagatttgggaggggccaggagcagaatgatatgttttggctgtgtccccacccaaatctcaccttgaattgtaatctccaaaatccccaggtgtcatgggagggacccagtgagaggtaattgaatcatggaggcagtttcccccatgctattctcatgatagtgggtgatttcacatgagatctgatggttttataagtgtctggcgtttcccctgctggcactcattctccctcctgccaccctgtgaagaggtgccttctgccatgattgtaagtttcctgaggcctccccagccatgcagaatggtgaatcaattaaaactgttttcttcataaattacccagtctcgggtatttcttcatagcagcatgagaacagactaatacaaccaacatcccctcttgtcgattttcattgaatccccattacctgggaatgaatgaggaaggcagaaatagaaatcagcgtattgttcaatatagaaatcctgaagttacacaagataattacgagcaagactcagtacagagaaggaacccttgagctggggatcagagtcttctggaaacaaggagtaccaaaggggagtgaaaaagagaagtggagaatgagtagtagcagtaaaagaggaagtatgtaaagaaatggaaataaagatgaaataaactgtcatcttgttccagagacaaagctagctaggggagctaaggaaatttagagggataaaaagtctcatccaaaccttcataatgagctaagggctagtttttcatagaccctagcccaacttgcaaccctctcactctcttacttttttcctggctctgttttgctttactgcctttcatataatctaaaatgatgttaaatgtatatttcctgtctcttttctatatcacaatataaattccatgaggccattgcctgtgccacatttaccactgtactcccagtgcctagaatggtgcccagatcaagtagactcccagagtgtctgttgtcaaatgattctcagtccagtgatgtttgcactacatggtgctgccacttttttttttttttttacttcattccatttggaatttggatcattttgccaactttagggtttattcctctttatttcccctgtgtttgctgaatatctgactatctatttttctcagctctcttctcctcacactttgcctccaacttcctctctgctacaaattatacttagcacaagactggagccacttttcattgattttgatgtcagtgcttgagtgacaactccatgtggagaactttcaacctcctgctgtctcgttgtttgctttgaaaaaaaaaaatactcatcttcttcctgaacccactgggtaaatttatgctcacaaaaaagacaaaacttctagaacaaaaactgtatgagcttcaaaagtattagttttcccttgattttgagactcaaaagtaccatagaaattttaaaagggggatgaagtaattttgtcattcaacccgatatattttacaatttgaatgtcagaaccatgaaatgtcttttcagtgtactatcatcctcactatttccacctataaaagaaaagcaaaaatattgtttgagaacaaaaaaatattgcagtagcggaaaaattcactttaagtctttttttggaggttgccacatcacgcctgtcttcagctcctctcactgaagattctttgttttcttgaaaccagttggtcacttccaattcttaccacctataaatcttcctggttctttatatttcactttatatgtcccttatctcctctgatttttgttccagtctttcattttttacattctttgtcatcctatatgtcagaaagaatctgccactccaaattccttaatatatttatctaccagtgtttatttgcctgtcacatgtactcttcagtaatccattgacttgaaaactttctactctgtctttcttactatagtttgcttcttgagttcaaattattaatatattaggtcaagtaattctatttttatgcacattttacctaacattcttggtaaatataattgttttttaaattgcatcacatggtgagtattaatttaagacgtaattagtattaatctactggacaagattttatttattaactgttttgccctttgctagggttctgtaatctcaccctcagtgcctttaaatagtcttacccaaggatcacctatccctcttcaatttaaattctctattgtgttagtttctgagattgcacattctctggtttggtttggtttttcagtgatctctgtggtcacttccaaccatttctacttagtttacttttttccctgttagccctcttcagtgttaatatcacctggaagttaacccattcctagtctgcattgctctatggccagcatcttggctgattggccatcacctatcctgtacttattgtcaatttttttaaattttttattgtggcaaacagcacataacggaaaatttaccatctgtctttgttcatgtatgttgctataaaggaatgccagagactgggcaatttataaagaatggaaggtttatttggctcatggttctgcaggctgtacaaaaaagcatggcaccactaccaacttctcatgagggcctcaggcttcttccattcatggtgaagggcaaaggggagctggtgtgtagagatcacatggttagagagcataaacaagagagagaggggaagtgccaggctgttatttggcaactagctcttgcagaacctaacagaatgagcagtcactcaacctgcccccaggaagggcattaagccattcaagaaggatccacccccatgaccccacacttcccgttaagccccacctccaatattgaggatcaaatttcaacatgagatttggaggggacaacatctgaactatagcattatcttaattcaaataattttactaccaattccatttattagagaatctaagattaagactactgaaactatgccaatgattatctctagttcaggcttctctcttcaattccaaactcatattttcacctgctgacaagctaccacgtagatgttccacaggtatttctaactcaggatatgtaaaattgatgttatcattattttctgaaaatctattcctcttactatattccctatttttgtgaatgacacaatctaatggactggccatgttaaaaatcaggaagtttttctggcactttctttattccttaatattaagccccacgataaattaccaatcctttcgatcttgttaagacaaataagcttgaaatttcttatctcttatttagcactgcaattttgttttctcattcattcagatagcatcttctacaaaacctcttcactagtttttctgtctctcagctcatcttgtacactgcaaatccattaaaactacactttttaacatgccaatcataatgtattagtaaaggttgtataatagttctctttctcttctaggataaaagctaaatttttcagcttggtacacaaggccgttcatggatttggtacctactagtctatctagggtatttcctacatcttccctcctctctcttgaaaaatcaagtaatactaaactatttgtaactccctaatcaccaattgctgcctttatactttaacatatattcttccttttgctagaaatacatttgtcataataggctctttggtaaacttaccattacattctcagtttataatattatttgtgtaagtaccttttttcctacttagtcctccaggggaatgcatgtgcttctctctccatattatcattttaaaatttactcctatttcagcaagtatcataatattttactgagattaattgttggcatatttatgttaccctggtgacatatttaatagttaagatgctttgggctgcaagaaagagaatgcactttcaaagtggcttcaaaaataagaataattcaactcacataactggaagttcagaggttaaagctggctccagatgaagtacaagcagagctctgtcactctttctctatgactttctttgtcctgatttttttctctgcgtcagctttgacctcctcactagttgccctccaggttccaagatgactgccagcaacaaatgggtaacataatttcttgttacagtgagagacataaacacttacctcacagattcagagatttcaccctcagataagaacaatcaaaattttaattgtgtatctactgtatcattagtatatgtattaggtattcatatatatctactattgtactaaagatgattcagaatggtttcataagctggttgatttaaacttttcttcctgaaccaagaggatgagattatcttgactggcttagaatcgaagatttaggtgaatctaaatccatctccagaactgaggatggattccgtagaaacttgaagacaattggaattctcctagaaagcagaatttcagagtgggtgtagggatatctttgaatggaagttgtttaagccaccaacaatattcactccattggggtgacactgggcccaaaggtacccagttaatatttgttcaacgaacctataggaagacaatattatctgcaagctatttataaactaaatgacaacgagaagtatttttagaaaagttaatcatatacaatttagtcattcacattgggaggctcttcctaaatttcgtttctgatccttatcttgatctttgacgcaatcatatcttggcctccatctaaaagccagtagaagcctctggccattttttaaacaattggtttaacaacattaattggaatctatatagctcaacttaaaaaaaaaaaaaagaggaactagcttatcataatacaatattgtcaaggcaagtgatacttccatgcagctattcagcatttggtgtattcttggtttctgcagacctaataaaaagagattatctcagcgtcctctaggtttaattttaaaaaacaagaaaccatgaacaatgaaaatgatttcaaaacatcttcactcacatctaaaatatgaaatagctagatcagaggttcttaataatttaatcggtgaagcataactgaaggatttagaaaaagtgcctaaactattaaaagattcttcagctgctgcttaatgttgatatcaagttattttttacactggcaaacagctaagccattccctggtcacatccacttttcagcatttagcgctcctctcaatcatcccgatcacagccccaggaatgtttcatggcatctccgcaataatagtatattactattgggtcctgaattttgaggtagtttatctttcagaaaggatatgaatagagcaataagtccaagtagagtgggctttattaatgatgcccaagattttagacgtatactataatcttcaatcaattttaacaccacttcccttaccctagttttagtctaaaccagtccaactgtgctgtagtctcagataatacaatgttagattttttttttcaagatatagaattgtcgggaaaacttgtatgtaacctataccaatctaaatttcttagcatttaactctaaagagtaaagcttttagcacttcctgtgtaatacaagggcaagtgctgatttctctgaatataattttcctttgttagcacatatgttcactgtttaataaaaataagaatgcttcaattatctccttttgtcaagggcctgagaaataaagaaatatacagagggtcccaatctaaaaatgttttgatttacaatggttcggcttaggatatttttattttacaatggtgtgaaagtaatatgcactcagtagaaatcatacttcaagtactcatacaactgttctgcttttcatgttcaatacagtattcaataaattacatgagatgttcaacacctttaataaaataggctttgtgttagatgattttgcccaactgtaggctaatgtaagtgttctgaccatgttgaaggtaggctaggctaagcaatgatgttcagtaggttaggtttattaaatgcatttttcaatttatgatgttttcaacttatgatgggtttttcaatttatgatgttttcaacgtatgatgggtttatcaggaaataatcccattgtacgttgaggagcacctgtatcaatataggcatttacacaactctcgtactgatagcggcaggaggcagagaagctctaggcagaaaagggatggtccccagcgaaaaccccaccctcaagccaaaaagcctgaaaccgcagctcaaagtgggaacttatatcccagttttcctgctcgaatgttgcctttttctaaaccacccatggccccaccccaccccatcctgtgcctataaaaaccccagactcagctggtagacaggactacagctggacatcagagagaagcagcttgacttcagagggacaacttgatggcataactttagagaagaatccggctggacttcaggggaagattacttgccacccccatccccttttcagctccccttcccactgagagccactttcatcggcagtacaatccctcacatttacaatccttcaatttgttcatgtgacctcattttccctagatgctggacaagagctcaggagccacaagtgtgaatacaaaaggccctttgcccttgctggtggagggcagctgcctcctgtgaaaagacaaatggcccactgagctgttaacgcctaagctgtccgtggatggcagagctaacagagcactgtaacacaccctctggggcttcaggggtcgcagacgcctccacctagatgctgctccagtgctcatgcactccagttcccacctcgtttgcttgcacactccctccagtgaggagttgagagcagtgggctaagtaaataaggcacccctgttgcgagttccacaaaggggtcagggaaatatcctgcttcgttactaagtaggtataaaccctttactaagttagtaattattcagtaataatacttaaatgaaagctattctgttagactaaattcagattatcaaagacacgacagaaaacagctttctcattcatgaacctattatttccttttgtaaaatatgttaaatgaaaatacagccgtcatgctaatttctaatggtagaacatattttgaaaactcctttatgtttggaagattttgctttagtgcagataatcagaatgatgtgatatactaagaaataatttttaaaatgagatgtgacatttctcataatctaaataagaaatggcaaaacattgtcctaagctaaataactcatatgaagtgataaaatattgctttctaaaggtccatgatatgtagtgatttctaatgtgtttaatagcattgatcctattgggtaattgggtggttctaacatgtaaggaaggcctccagtactaatttcatgtactgggaaactactgggcagggatgaatcccttaactcctaagtaagactatcagatcatataaatctgctttttgatttgcaaagactcttaggcatacctcttgagaatattaaacatctactaaattatatgtaaagcatttcagtctaagatttacaatgctcaaaggagaaagattttaaagttcagcattggaatttccataatttccttccaattgtagaattttacaattgagatagcaaataataatataaataaatatgtaagactgaaatcaacataggagtttggaaagaagactgtatgggttaactagagttgtcaacaaagacttcacagaagattgtgatcgtagacattagtaaggaataaaatgggtgcaaaaaaaagtctaagaaacaacaaggataaatttattttgtaaagagtgaaagcatattgggtattacataaagagactggctagtttgacacaatgtgtacttttggggtaagcagtgggaaatcactttctgtaagtaaagtggaagagaattcaggtattggatatggtcatataggatttttcaacctttgttttgcccccatccctatcctaccagtatcatcacagatgttggcaatattcactcacttgcctgaagatagatattcatgtcaggggctacagatatgtaaaggtgaatgaagttaaatagcaaaattcaagcacactagttctgactgtgcaccctctctcactcagaaaagcactttggaatgcgagagtactcttatattgacaacctttagttggttctaatttataaaaaaatataaaaatatttagacaatttggatattttatatctatgccacaacccattgtcaaatgattgagatatcattgtttggcaacaatgaaactgaaatcaactctaagagtaaagagtacgacttttaaagatatttggttaagagtaatgttgcaaggcagagaccaacattatagaagttctcaacctgtgtgctggatatagctaaaatttcccaggaccattgaaagaaattctcaaatccacaaccacctcaagtgttgtctgtgaatcaaaggagtgatgcattacccacaaacatgtagtagacattttttaagtgatgtagatgctactgcaattaataaatgcaaaattatattacaatattactgaattcagaataagttgattttgtcactatttttctcaatctacgcatgctagatataaagttattatatagagacgtaacatttttaatatttcagaagcatgctcatgatattgtaaaccaggcactgttaaaagatcactggattgggaattaataaacctgggatctagtcctcatttgatctcttgttggctatggtttgggggttttgggcaaactattcaaccttttctgccttggtttaattgataaatgatggtgttttcccagataaatcccttcccaacttaatattaccagatgtagcatctatggtttagaatgtacagtataaattaaccttcctgaagatcttcacaagttactataacctatattttcatggcactgaaaactaagtttttgatagcttacgtttttataaataatttacttactcatttttatcataataataaatctgattcactaatcaccaaaatatcatttttgaaaatagatgcatgaaaggatccgaacttgttatggttttatctgttcaagtcacctaattttggtagccacaggcccccattgtcaataggggaagattatccattttagcaatacagtctctgataacttcagcccatatgcccttcaattccacttttacgtcagattgaatgggaatgtgaggcccccagtagtaaactaaccctactttctctttggaaattggtctttctacctagctctttgcctctgttcacgttcttgtattccacagaaaatatatacattaggtgttaaaatcacaatgattaacaatttttaagtagaaatagttattaagtatagcataatcatgcctttgaattagtacaaaagtaggaaacagagctttagtgacttttttcattctttccaccatttacagggcaaaaatgaagaattttaccaattcaaaactatgcacatgtatagtttccaccagtatttagtagttatgtttctcaagatgtataattcctttcctttctgttttctgtagtttgataaaccctagataggagttaatgttgtttcagttaggtttattatttcttttatgtggtttaatttcatgcaataagctagagattttgtaacataacttgataaaaattttctcccttcgtatctttttgttttaaaataatggattaatatagattgtaattttacagtagaggaaatacattttacttttagttcttatctagatatcttaggaaaaaagaaacatcatttttaaggattattatttttctactaatgaaaaaaatagcatgattttccattctggactttgtaattaactttaccttggaataattgaatcttaaatataacttcattgaaaattttattttcaagtaacattttaaaatgcaaaatttgtgtgatctctactaaaaagaactctcacatcccaatgtgcttatagctacaataattggttaaaagagacaaattataaagaagatataggttgtgacattgaaattacaaaatgtggattagggaagtaagcgtgtagagttttgtatgcaatcaaagttaagttattaccagcttaaaaaacccttacgtaagatgtaaagaaaagcaaaaacctatagtagcaaaagcaaaaacctatagtagatatacaaaaggtaaaaagtaaggaatcaaagtatactactgagcaaaacagtcaaaccataaaagaagacaacaaaaaaaggcatatagaacaaaggatctacaaaacaattagaaaacaactttttaaatggcagtagtaaattcctacctatcaatatttactttgaatgtaaatggattaaattcaccagtctaaagatagagtggccaaatggattaaaacaacaagactcaactacatgctgcccataagagactcacgtcatcttttaggacacatgttgactgaaatagaagagatagaaaaagatattttggtttccatgcaaatggaaaccaaaagagaatggggatagccatacttctattagacaaaataggctttaaaaatcaaaaactaaaaagacacaaagaaggtcattaaataatgataaaaggatcaattcatcaagaaggtataacaattgtaaatatatatgcacccaacattggagtacctaaatatataaagcaaatataaagtgataaaaagaaagagacaaactacagtacaataatagtaggggacttctaccccaaattcaacaatagacagaaaatccacattaaaaaatcaataagaatgcattggactttatgctttagatcaaatagacctagcagacatatacagtacatctcatctaacagcaggagaatatacattcttatcaagtgcacaagaaacaattcttcagggtagatcatatgttaggccacaaaatgagtcctaacaaatttaacaagattgaaagcatgtattttatgtaaaacaacgccatcatggaaaaagtactagtgtaaacaaggtttaaatatgatttactgattgtttaaaaaggaattatcttagccctgatctgatgggatttcccctttgtaagcagcaaaaataagttcataatgaagcaactgtaataatacagcttcacagatctttctgaataaacagagttggatatgtttctacttcagaaaccatttactgtgggctcacagcttttccatacactctttacactcttaattttaaacccattcatcaaaaggattaagacaatgagattcaagtccaagacaataggaagtatgtgcatcaaaactgtcatgctaatgctctgaggaacattgttatttcaatagcataatttaaaaccactgaaaccatgttttatttatgattacctttcatacgttcaaaaagaatttgagatggtttggcagggatgtcttaaagaaacaaacaccaaatttttatttgttgtgcttctaacaagcaatttttcctacgtaagtgttacctgttttctccccttgattttgatctcttttgtatggttggtagttgtcgcacttctgggcatagtatggttttctacaagttaaataaaaacataaattgattttgatgtagctagttccactatttcagttagtgtgttttccatacctgcaattcataacatgtttactgacccagaacgttaaaactcaagtttagttcaatacagtcacttcaaaccaacttaagatagcagttacatttccaaggtcattatgaagacggagttcaagacttcagcagttgaatttgtcaagctcatgggtcttttagttacaggaagtgtgcatatttcacataagaaacagcaactctgatgatacattgaaactcaaatatacccaaggagtgtaaaactactttataagcccttaaacaataaatatgccaacaatcctctgcatactttttgtcattttttagagcattcaattgaattatataacatgtgataccaataaataattaactttttatttatttatttagagaatgattcttgctttgtctcccaggctggagtgcaatggcatgatctcagctcactgcaacctccacctcttagtttcaagtgattctcctgcctcagcctcccaagtagctgggattacagccatgcaccaccacgcctggctaattttgtacttttagtagagacagggtttcaccataatgatcaggctggccttgaactccggacctcaggtgttctaccacctcagcctcccaaagtgctggtattacaggcatgagccacagcgcctggcttataattaactttaaaaaatattctactatcgaatgcctgaaaaaatcatattacttctatgtattaaaaacaaactattacgtaaatagaccagagatacggtgtcagagatgagattccttggcaacagtctctgagacaaaaagttgcacacagaaagtattttgagaagtattgttgctatttataaggaagtgaaggaggcagtattgggcagagagaaaagctcatccacactgcagttgctactgaggcttcagcccatgtgacagggacactggagctgggatggtctttcagagttctaccaaattgaggcaaatgggcgagacttttgtatctttgcactagccaagagcaggcaccagggagaaatgcagctgtgatccttttgtagatattattattctggagtcaatgcaaccacaccacaaatactaggaataatattggtagtgtgggtgcatcgactccagaagaggatcttgatgaagcattacagtatccactacagagaggcactggcatattctgcttaccccacaaatattgcaatgaggatgcaagtaggagtagtgaggacataaaataaatcgattattttccactgggccttaatatatcagaaccattggaatttacaggatgatatttattatagtactcaaaaaaatctcttttaaatctccttaactcagaagggaattttaaaaagtccacaattcacctggtctatgaattcccttttaaaataaaatgtggtttaatcaaatttacaagaaaaaaacaaacaaccccatcaaaaagtgggggaaggatataaacagactcttctcaaaagaagacatttatgtggccaaaagacacatgaaaaaaagctcatcatcactggtcattagagaaatgcaaatcaaaaccgcaatgagataccatctcacatcagttagaaaggcgatcattaaaaagtcaggaaacaacagatgctggagaggatgtggagaaataggaacgcttttacactgttggtgggagtgtgaattacttcaaccattgtggaagaccgtgtggcgattcctcaaggatctacaaccagaaataccatttaactcagccatcccattactgggtatatacccaaaggattataaatcattctactgtaaagacacatgcacacgtacgtttgttgcagcactgtttacaatagcaaagacttggaaccaacccaaatgtccatcaataatagactggatacagaaaatgtggcacatatacaccatagaatactatgcagccataaaaaaggatgcgttcgtgtcctttgtaaggacatggatgaagctggaaaccatcattctcagcaaactaacacaggaacagaaaaccaaacaccgcatgttctcactcataagtgggagttgaacgatgagaacacatggagatgggggaggggaacatcacacaccagttgggggattggggggcagagggagggataacgttaggagaaatacctaatgtagatgaagggttgatgggtacagcaaaccaccatggcacgtgtatacctacgtagcaaacctgtacattctgcacatgtatcccagaacttaaagtataatttaaaaaatgtggttgaaaaacaaaacccacataatacaaactttgccagcttaactgttttatgtgtacaaaccagtagtgttaactatacatacattgttattcaacagatctctagaatgttttcatctctcaaatccgaaactccaaacccactgaagagctcccattgctccctgtaccccagcactggcaatatgaccactctactttctgtctctaaagagtttaactactttagatacatcatataaaaggaagcatgcagtatttgtcattttatgactggcttatttcacttagcataatgtcttcaaggtacacccatgttgtagcataggaaaggatttccttctttttttgtggccgagtaataatattccgttgtgtcctataccacattttttaatccgtttatcaatcaatggacattttagttacttcaatttttggctattgtgaattatgccgcagttaatatgagtgtgcaaatatctctttaagatcctgtttttaattcttttggatatacagatgctcattgatttacactgggattacatcccaatcagcccatcataagttgaaaatatcatgtcaaaaattaatttaatatgcctaagctaccaaacatcattgcttagtctagcatactttaaatgttatcagaacatgtagattacagtacatctgggcaaaatcatcttgcaacacagtacatagtagagtatcaattatttatcctcatgataaatatcatgctgcaacccaatatgtcagaagagagtatcatactgcatatttactagccctagaaaagatcaaaattcaaaatttgaagtatggtttcttaatgaatgcatatcgctttcacaccattgtaaagtccaaaaattacaagttagaccttagtaagttggggactaaccgtacacccagaaatgggattgctggattatatgataattctatttttattttttgaggactggattatatgataattctatttttatgttttgaggaacttccatacggttttccatagtggctacaccttttcacattcccaccaacaatgcagaagtgtttcagtttctccacatccttgccagcacatgttattttctgtttatgatcgtggtcatcctcatggttgtgaggtaatatctcattgtggttttcgttcttcatttgcatttccccgatgattgacgatgttgagtatgttttcagatgcttgttggctgtgtatatattttctttggagaaatgtctatttaaatccttgcccattttaaaatcaggttaattgtttttggtgaattccttattaattactcacctcagagcctttcttcttaaaatacagatttctcagaacctttcatctaatttactaaatgttgatcttgaagaagtattttaatttatctgaatttagtttcccgttctataaattgatagtaatcatgttttccctatccacaccagagtggtatgatgaggaaccaatgcagaaaatgactaaaaaggcatttttatgctgtccagatcttgtgcaaatatattataattgatttgaaccaaaagaatctacattttaagactatttaatattgtcgcatttacattgcactaatggttcctcttttttctcactgatgaagttctagattgaaactctgaggaaactgtaaatcacagttacataactctgttatattaatttatataacttctctgtctctctctaaatatatatatttagactatatatacatatgcatatatatatttagagagagaacgagattacacttaaggactctgcttagtacattgcaacttgcacctcattctaattgtgaaaacaacaacaaattttgattgagaccctgttatttttcagacctttggtcttgtgaggaaggaaaagatgattctgatacttatctcaaatagcttatcatctcctctggtggatgaggcttgtgagggcctgacacatggtagaggatcttattcattatataacaactttcaaaacacatcactaattatttttctgcttaaggtgaaaacgtagctctcccaaacaaataagagatttagactgaattctgtagaaaacactgcttacctcattttgcttagttttcactgcagagtcttgtctctaacattcaggtaggaggaactctattttaaaaaattgaataaacaaacccaaatcagaataaattatttaattcaggagttttttaaggtgctcagaattttggtagaatagcagtgtattttctgtaataagaactacacaatgttctctagctggttatactcaaatggttatatggattttattctgatatcagttttgcaattgatgaccacccttcatcaatagcgtggtctttattatggtttcatctggctttttcttcccttgtcttctgcactgggctgcctacttcttggctcttattattacatactctacttttttcatatacaaaggtcttagtgcattaatagtgagtttctgctaaaagtgttactttcttcaaatatcctgtcaaatgctggctgcctgatttattgacctcatagagtgactatgtgaatcttccattctctgtggaattccattccacattttaacttaaagactccgtcttttccagctgtgttctctctgctggataagcatttttcttttaatttctgtggtaatgggaagggaattttaaatcctgttttgcgtacaagtgtttaacaggtaaaaatggatgctgtgtcagctatctattgctgtgtaacaagctaccccaaatgtagagacttaaaataagaatcattttttttttttagctcatgattcttgattctgcttggggcttggttcatcgaggcgattcttttgctagactcagctgtgctcattcatgcactcgtggtcagctggtagttgatgaccacatgtggcattcatatgtctggtataactttttggttataagttgagacggtgtgggtgacaggatcacttgcctgtaattattcatcaggctagcatagttccatagcggtggaagagttccaagcatagcccaacacccaagcattgttaagcctctgcttatgtcatgtttgctgatacctcattagccgaaacaagtgacttgaccaatccatattcaaggagtggagaaacagactatggctcttaatgggagaatctggaatatctcttgacaaaagtgtagatgcaagaggagaatctgtggacatttactctccagcagagatgttgtcatttttgtcactaagacagttcctgtgtaatattatttattattccttggcagccataagtttgtggtttacttatggatacttcagtgcctgcccaatatcatgttggaaagagaagcccttaacaatttctcttaatttctacttctgaggaatgagaaaaaaaaaattggataggcataaatgatttccagcacaaattctaagcagctatttgagaggtgggtgggtagggagagatggaaaatccttttaattgagacatgctcaaccataagcaatttttctttcctcaggagacatttggtaatgtcaggagacatttttggttgtacatctaggagggagctctggccagagatactgacaagcaattctgatcctacaatgcacaggacagccactcacgacaaaaaattatctgggacaaaaatgtcaatagtgctgagattgagaaaccctgcttttcactgagcgcatgtagatgaattcatataatgttagttatagaagggcacttagatgatgccaactaaaacaggaaaaggcaatgattatttctctattcaagttagtgaaggaaggatatgtttaaagtcaggttggagatatttctcaagggtaatatttaagttgtgagtggatgccagatgcgcttgattgttacaatccatatttttatagctatatcaaatgatcttctctcccaaattaaaatggatattagatatatttcatggataccatatattataagctatagctcttagaagtatttgagtgattaataattcttgcatattgaatgagacatgtaagaaagatacctgatgtcctatgattcttagaaatatgtgcagtggttaagcacattgtcttggaaacatcacttgttaatgtgagatcctgaacaagtttcgttaccttggtaaaagggggatgataacatctaccctgaagatggtttggtaaaggtgaaataaaagagggtttatgaagaaccttgcctagcacataagaatcactgagtaaatgatgggggtgatggcagtgttggtggcaattatcttacttgtaagtagtagcaaatatttatttggattatatttttaatagcaagaaagaatctattaaaatgtaagcaaatagcaccattaagctttaaaaatccatagctcccaaacttaacatttttttttcttaaatccagaaatacaaatggttatcatgaatccttgagttccagtactccggccttgcctatgtagagtacaagcatttatttttctaaaatgagaattattgatgttaggtgtgtcatatattttatttactctttagagtgacagaaaagaaagcagacaaaaataagtgtttatgtgttcatagtgtttgtttctaattttccaacttgtatgtgcagactgtaaatatttagagggaagacatgaaattcttccttacctacacaatagattgtctttcttagaatctagacatgatttcaaattttcttcagaagttctcttgaattcttacggaattcattaatccaaatgccatcctttcaaatattcaaaaagaaaatattctccaatgttgcttacatggaggagagttattttatctactagtgagatggaagtcgctaacaatctttcttataccccatagtattaaatagtaatgcaatttgatcacatataacattgctctcctgttgacatggaatgataaggaggaagggaatatctaacagcactttttagatattctctcatagaattgttaatgtgagcccaataacttattttgtaagttgagtgatttttcaaatataaaagtgaagcaaacaaaaaaagttacccacattcattcaacaaagctagaaatagagtatgtgcttcttgctttcttatcaaccaaaggagacctgtgaattacaggaaaaccatgtgtgaatacttcaaaggaaatatgccaaacacattgtgtgtgtgttttaaaagatttagtagctcctttaaagctctaagtaaagctgttagtctgactaatcatgtacccctgaaaccaattaaattttcagactagagaagtgttcttcaaacacttgaaaaaaataagagttccttcctaaagccaacaccttttaattaacaaaatactcagagcaaagctgtggtttgcaatagtatattacacctactgttattcatgctaccattctggtgtgccaaactcaattcatttcaactattttgagcttgattttctgtctgcttaactatggagggaaaaccacaattttagtagagtcattttaattttctaatgaatgcatgagaaaggtattatgctacatagtatgtcctcagactattcagatgccctctctctctcttgctctgtctctgtctgtctctctttacacacacacacacacacacacacacacacacaatgtgtgtatctatctgtctacctagatatacagtttaattttgtacattgtaatacatctggttctggcataaggtgattgagcaaaaaacaaacaaacaaaacccacccaaatctgttactggaggaacctttaatagcataacatcagaaagactattttcagtaaggaccctaggcaggaaaagacaattcctccaatggacttgagaagaatacccttagtctctgaggtggttagagaggctgagatctgaaccagctaataccagagccagcttcttgtaacccaagataggggcataagaaacggggtgaatgcccaggcatgaacagacttggggttaagattaaatagggtacacgggaaaggatttccgccagctggaggggaagccatttcccatgctccttagggatgacaacaggagacccagcccagaacatcattgaaaattctatgtaataatttatatatcctaactctttacccgttcgttctagattatggattcaggcactcttagcaaaacaaatcctctttcagtcttttaaaatattgacttaacaggaaatatccttggcacaacaatacgaccctgcctgacccttagaactgtgaacaggttgctcagactgtacaaaaccactaacaaatctgaccagcctacacttcactgaaaaaggtgatttgcatatatttctagtactatgacatggtggaaaagaaagaaccgcatatgtgttagataaaggtaaacgcatctgaaagtgcagtaagaatcaatgtgatatatacaataaaataagataaataggccgggcatggtggctcatgcctgtaatcccagcactttgggaggccgaggcaggcagatcacgaggtcaggagatcgagaccatcctggccaacatggtgaaaccccgtctccactaaagtacaaaaaattagttgggcatggtggcaaatgcctgtagtcccagatactcaggaggctgaggcaggggaatcgcttgaacccgcgaggcagagattgcagtgagctgagatcacgccactgcactccagcctggcaacagagcaacactctgtctcaaaaaaaaaaaaaaaaaaaaaaaatttcaggacttcaaaacttctgtcctttgaaacactttgattaaaaaatgaaaaaaatatatacatgcctgaatccagaggcaagtctttttagaaaacataaaatattttaagtaatgtttttctgaacagaaatggctctaatgtgagaggtcgatgaagattagcctcttgcttctttatgttttaaagtatattccttgagacccaaagtttctgactttagaatccaactctcaactactatcagctatcctctagacactttcaaaatcctccaaaacctaatagtggtgcaagattttgtccttcctagtgataactagatttaagtaagaaaacgttaaagactaaaaagtgtttaggacccacaagaaaggtgtaattctgttcctcatggagatattttagttacacacttcttattctggtcctccccaaaacacagaaatctagagttgacatttaaagagaaaatgagatttttgtctggaaacaggagagaaaaagttttcaagaagtatagaaagcgtatgaaaggacacaggtttgaaatggcctgtgctcatgagagaatgcacaatagacatgggtgtggaggagcctggaaagaatggagagaggtaagtctggagggtcaaatctggttcagagtacagagcataaaatcccatacgaatgtagaacatgaggagccaataaccattgtgtgagaaatgcaggaaaaagaggaagaaaaaaatccacatagtgtacttacagtcagaacaatcctaggaggtgacttacatgtatgatgtcataaaatccgtaacacaattccattagattggtactgttttcatagttacacaggtgaaaacttttgagggtcaagatgttcattgtagcaggcatagtataattccttacctcaagatgcctccaatgtcagtgaacattacttttccaagattgtctatttaggaaaaagtaaggccagttgtctatgaaggaagtactattataatcgccactttacagaggagtaaatggagattcagagaggttaagtcatctgactatagttacacagctaaaaaaaaaaaaaattatagagcaaggattcaaatacaacaatctggtcctagaaagcctaaatattctacaccctgctttctgattcagagctatttcctgcttttctcccttcgataggaaaaaaaatgtatgtgtgtggggttgggggcaaataaattgactggctgtattttctctctttaatatttgatctttcattgtctgctccaagcagtgggtcttcctccattatcttctcgtgaaaatagctaaaatcacctaactagtaaaaacctaggcatgttttgtgttctagcctccattcttccattctaatgggtggctgttaaattttagtactcattgtatgtagaagacctctaagttcactaaagagcttactgcacattgacttttctttagattcaaagggaatcaattgagcacctcctatactccaggacatgtgcaagatgcaagagatagagcagtgagaaagtctgataaggtttcccctccctttcccagcagtgtacagatagatgttcttcaggtggtgcatgctggagaagagaagaccagaaatactggcctgacgggtctatagatgagattatctgcccatgactggcgcagggatggccgcattgctagacctctccatcatcctctgaatatgcttcagctaatttatcatcccaatggcatatttagtcatcatgaaccattctctctttttgagtctcaggccctggccttgcttttcaatagacttccaatagattccttcctccttccttcccttactgcctggcttcctgacttccttccttcctgccttcctgccttgtcttgccttgcttttcaatagattccctccctccctccctccctccttcctccctccctccctccctgactttcttctttccttcttcctttctgtctttttccaaacgtgcttttcaggaaacagtggtctgcttgttgaagtctgataattctctagttcctcatccttcactttattgaaatttagtgtgacatgatcatttccacctcattaggtacttctttcatggtcagaagtaagtctggagaaaaaaaaaaaatctcttgtctctgctcttatttgagggtcaaattttcaataagtcactttttaaaaaagcattttctgacacttcccataagcttgaaatcctcctaaattgctgtatattgcctcagtataccttgtgtatctattttaggaacactccatccacatttgccagtcagcctggtgttctgcagttagttcctacagtgatattttaatttagctctcttttcatcctcacacatgcatcctctctggatatttagctcctttcctggaatcccttttaagatttctagatctttttgcttccatgatttcttctcctggactgtgacacaaaatgctatttcttctttacattacatttaattctttctagaaagagcctcagagtagtcagatagctttgagaaacaaaactttttctttattgcctcactgttactgcctttcaatcattgtttcgtgacacaaatttttttattctctctgacaattaaaacactatttttttctgtctgcattgatcaaaattagttccttcattcatagaaaactcttggtgtccctgagaagcttgagagacaagaaacattcttccattctactcatcttcttctctaatgaggagacaaccttaaaagcacagttacatagccataaaaattaatgattggctacctcagaatgaaaattcaatgtctcatttttttttaatattcttagaatcgttcactggttgtccagtgtgagtctcctgttgagatgtcttttgcagctttccttgaaacctttcattccaaactacatagtccaataattttgccaccaatcttctggttatattatgctcttgagtctgttgtctataaacttgattaggcattccttcccctcaccactcacctctgataacccagctgtgtgttggtatttagtatcaattcacaccagcaagttcagccctcttcaatcaatatagggccacacacggacttttgactgactactccccaagtatttcacattttggggccttatctccagtttctcaccacagttgttcatcactgtgtttcttactagccaggcgtttataaaaacagtaatacctaacactattgatcacctactatagtgtcaggcgctgtaataatattattgtgatgatgatgattatgctgctctttctggcattgtcatacgtgtattgcttgtactactcactgaatctacacaactgcccttatgacatttaccctgttattattcctcttttaaggtaaatacatgaaaaatgcttcccactttgccttgcttactgcttattgctagtactgaacaaatgttagaactgaaacttagagaggttatgtggctttaccaaggtcccagagttcctagggcagagaacaggattgtctaccagacattttaattctagtactatgcatcttaaccattaccataggctgacttactctacagtgtccaacactattcatattaagatttatttaatgactttgaaacagtatttcatgtctaaatagaaaaactactaactcgcatttttaagaaaatattgtatcttggtttttcttcactgctggccagtttactaacaatctgaaataaaaagaaaaaaatatgataaactgctcccagtataaaatacagagctaagacaagaacgtttcattggctttgatttccctagggtccagcttcaaattaatttacttcctattcaagggaattttaaatcagaaagaagatcttatcccatcttgttttgcctttgttttttcttgaataaaaaaaaaataagtaaaatttatttccctggcaaggtctgaaaacttttgttttctttaccacttccacaatgtatatgattgttactgagaaggcttatttaacttaagttacttgtccaggcatgagaatgagcaaaatcgttttttaaaaaattgttaaatgtatattaatgaaaaggttgaatcttttcattttctaccatgtattgctaaacaaagtatccacattgttagaaaaagatatataatgtcatgaataagagtttggctcaaattgttactcttcaattaaatttgacttattgttattgaaattggctctttagcttgtgtttctaatttttctttttcttcttttttcctttttgcaaaaacccaaaatattttagctcctactcagactgttactctggtgacacaacctgtggttactaaggaaactgccatctccaaactagaaatgccatcttccttgatgttggaggtacctgctctggcagatttcaaccgggcttggacagaacttaccgactggctttctctgcttgatcaagttataaaatcacagagggtgatggtgggtgaccttgaggatatcaacgagatgatcatcaagcagaaggtatgagaaaaaatgataaaagttggcagaagtttttctttaaaatgaagattttccaccaatcactttactctcctagaccatttcccaccagttcttaggcaactgtttctctctcagcaaacacattactctcactattcagcctaagtataatcaaggatataaattaatgcaaataacaaaagtagccatacattaaaaaggaaatatacaaaaaaaaaaaaaaaaaaaagcagaaaccttacaagaatagttgtctcagttaaatttactaaacaacctggtattttaaaaatctattttataccaaataagtcactcaactgagctatttacatttaaactgtttgttttggcactacgcagcccaacatattgcagaatcaaatataatagtctgggaattgattattatccactcttctaagttgtctgtgccaatttgccttctccaatgataaggataattgaaagagagctataacttaaaaagagaaaagtaacaaaacataagatatttaaaattaccctagatcttaaagttggcatttatgcaatgccatgttcaaatgaacatgtttttaatacaaatagtgcatttttcagcctcagtgtaatccatttggtaaaattatgacatcaactagaaacattagaatacattgatgtaaatatggtttacctagctagatcaaatatactatatatcttttatatttgtgaatgattaagaaaaataatgttggaattgttatacattaaagttttttcacttgtaacagctttcaagcctttctaaagaaatacaaagttgtgctgaaggtatttaggtattaaagtactaccttttgaaaaaacaagaagtgaggcagacagagtaaggggaatttctttgtaaaataaacttcaccaattccataggaataaaagtaatttgatagtaaacaacctgcatttaaaggccttgagcttgaatacagaagacctgaattcagtgccatttgcaaatgatgattgtggtcaagccatctctggatcttcgtttcctattctgagtacagagcatacagagtacacattcacattcacaatatagttatggatatggatgtatataaatatatgtaaatactacatatatgtacctaaaatttgttttacttctgctttaaaaaaagtaattatagccacatttttcagaaaaagtaactgaggctcatagatgtcaaattcccagtaagtagcagaacaaggattcaaatccaagtccatttgattcctaagcttgtgttattacttgctactgcagagagtatacgtagcaagtaatatatgtactgcaagcaatacatactattgctgcggtaataactgtaactgcagttactatttagtgatttgtatgtagatgtagatgtagtctatgtcagacactatgctgagcattttatggttgctatgtactgatacatacagaaacaagaggtacgttcttttacaataccatattgagttatataatactcccaggacttttatttaccaaaggaaacaatattttataatgtttaaagcccaggttttgaagttacattgtctgggttcaaagcttggctcccaagctgtgtgaccttgagtaagttattctgcctacctgagcccaagtttatctagctataaaatggggatagttgtactatctgccttgcagtttgtcatcaggattaagttggttggtacatgaaaaatgcttcccactttgccttgcttactgcttactgctagtattgaacaaatgttagtaattatatttggttccaccacgaactctagaaatctaaccaatgatggcatttgtattatgcaaactgtatatcacatcataatattatatggaaatgagagcttgtttccgcttctgtagcctagtctaccattgacatagcttcctgcagaagttaccagataatagattgggagagaaagtccacacttccttgtgacgggtttgtgagtccagcatttagggaagccattgatgtgctcagtagtctccagagttctctaaataaatgtgtccttttcagaaaggactactgatttgatgccccctcacagagatcgtctttaaatataggtcaaaaactaatgtagagggccaggtgcaatgtttcacgcctgcactcccagcgctttgggaggctgaggcaggtggatcacttgaggtcaggagtttgagaccagcctggtcaacatggccaaaccccatctctactgaaaataaaaaaattagctggtgtggtggcccatgcctataatcccagctactagggaggctgaggcaggagaatcacttgaatcctggaccagaggttccattgagctgagatcacaccattgcactccagactgagtgacagagtgagactccatctcagaaaaaaaaaaatttagggggaaaaatcaaaagccatttctgagacacaaaaatacaggatttataaattatatatggtatatataaaaatatttttaaaatagtatatatagcatattatatataatgatatgtaatgttcatatattacatatttataaaaaaatctaatctcccttctcttgcttgctgaatagggggatgctttgcctgcctcttcctcttatattaaaaaataattcttaaagacattgtcagttcttggcttttatagcctcaatcaccaaattgtcggtaaaatggccctaaataatcattaaacaaatgtgtgtgagaggggaaataagaaggataagtaagtatggggaggattttgttataatttcaggaaatcaatatcaattttatgtaaagttttaaataaagcaatcccaactttaatgtttgatgtgtgaaaaattaggcaaaattccaaaagggctttataaactgaaaaaaactttactaacacctatccatttttattattttaaccaacttctattgagctgccactaagtacctgggaaacataaagttgtacaacatagaatgtgcaggtaaaagaggttgaaggaagaaaataataacactatgatagagataaattttaggataatagctaacacatatgatatgccagtcattgatctaagtacttcacgtgaattctttaatgcttacaacattactgtgaggtagatagagaggcacagtaaggataataacctgcctgagatcgaggaagaaagacaatgatgagatgtgaactcaggcagtttggttccagagtcctctcccttaaacctcatagttttcaacttctctgatattgtgtgggtgatgctgttggggctttcttcagggaaaactaagccaggagagagaatggatgctagtgagatattcctgaagaaggaaaaacttaagccaggcattaaagaatgagttggaattacctagctagataaaacgagaagggcaatccaggcagagggaacagactgtgcttttcactgaggtggaaaaaaaacagagtatatcagaggaattgtgattccatatggctgaagttaagggtatatgatgaggaagaaattgatgaggttgaatagagaggactggggctaaataatgggaatcctttgttgccagactgaggaattttgatgatggcctacaggcagtggcaactctgaaaggattgtaaacaggaaaataaaatcatcacatatagtttagttgcctatcaattagagctctctggatgcaagcaacagaaatcattctctgattaaatcaggcagaaagtaaatgtgctgtaattagcacaaaggcattggaacaaaacttacaaaaggaaaaagaatctgagcatgcctttctgggcatgtggctagcaagaagtattccagtctgtttgtgatactctcttttctccatcctgtgtgtaactctgttcaaattttaaagtcttaaaagagagtccagttcaccttgtttgggtcacatgttaatacatgagctagaagggagcagaaaactttgatttaaatccctctcctcccaaagtctcaaaattagggaaaggcaattctcctgaatagaaactgggttctattgacaatagaagaaggaaatgattctgaccaaccactaaacaataattgtccactgaactcagtcaagaacatgtagaataagttggaggatagagcaaataaaggagatttgtaggaggtaattattatgatctaaagcaagcttgttcaactcatggcctgtgagccacatgcgtcccaggatggctttgaatgtggcccaacacaaatttgtaaactttcttaaaacatgagatactttttgtgacttttttttgctcatcagctatcattagtgttagtgtattttatgtgtggcccaggacaattcttcttccagtgtggcccagggaagccaaaagattggatacagctgatctaaagcaacaggttcatctactcaacttcacaacgtgtagacctgaaataaagaccattcatataccaatacctgaaatataaatttgtttgaccatgacacgtacagtaattggttctcaataaatgtggatagcttgatggataatgtgaatgcaatgtgataaggaaacttcatattcaacaaagactggaatgtgaggattataattccaaagcaccagaagatagataagataatgcaatgagacattttatgactcaaggcaaagttagttatgagattcagaccaaaccttagacgtgcagtaattgaaatatttgccacagaaggggtataaggacatgacattcaagtaagctaacctttcactagctttagactttgaactcagaaaacatatttggtgaaaagcttatggtcccctttagtatgtattgcttgattaaagtattattttagaaaatggtgagctgcttccattttgaaataaaaataatttttactaagtgaattatattcagtgaaaaaaatggaagctacaattacaactttaatttttttaagttttaagaatacagccatttaaaaaaattaagcaaatctgcttcattttagacagtagaaaatataccattatcttttagaagaatagagatgtgaaatatgcaaattaagcctttagaagtaaagcacacatgaagttcaaagtttaatttctagaattgtgaatcaatagcagtggatgatttgtactttatagcttagtgtcggagaaatctgattaaaaaatgctttttctgtttcatcacataaacataagtaaaattgctctgaaacaacaatatttgacaagaattagcagttttcttttttgacataatctatcaaatgaagggaaaaatatgtcctgggttttgctttgagagtgattactaaatctgacccttaaggaaaggaaggagagaacaaagaagggaggaaagaaagggaaggaaggaggaggaaagggaaaaaaagaaggaagagaggaaggaaagcaggaaaaaggggaaggagagagaaaagacaaaagaaaggtagcaaggaaagaaaaaaagacaagaaaggaatattaaagaggacaaaagaggagtgaggaaaggaggaaatggaagagggatggtgggagacaggagggagaaaggtggagggggaaatatgaagagaggttcccagcagtggagactagtgttgctatcaacaaatagaatttagatggccatatgatattatttttcataatactggtgtctgattgcctgtgctgagttaattgtagtcttttttttcaattccgtttggccaggtgttcaggataattcaccacaaaatctcaaccactgcacttgtattgaataaagaattgagttggcaaaggcattttatcctccagtaagacctttccagattggggttgagacaaattggccaatctggacaagatgataatagcattgttcaagattaatttttaaccacacattgcactgttacctgggagatttcattatctaaaaattgaatgagcagttttagtgggtatagtgtatatttaaatgggacataattacttgaatgagtttaatttttgttgttgttgttaaggtcaaagtacttaaaaattatgattttttaaaactctgtctatacacaaaaagcatttgaattagctacagaataattctgattataacttttggtgaatagattcagtcaaaatctgattactaaacaacttgtgtagtatagccctggaagaattgatgggacaatgtgtgggtaaagtggcattggctatttaaactaaaagcaatacaaaacagaatgtttcttggttttattctgttgtcacaaacccagcagaaagtggctattacaatagtttcccttattcaacaaatgagagaagttatagacaatttagttaattgatctaaagtcacttagtaaatgtaattgtcctaacataaacccagacccccagacctcttgggaatagataatgtttcttacttcttttctatttcctcagccacccccctcaacttcttacacatctcatttctccatccaaattataacaaaacaaagcaaacatggtttatttccatgggcatcaaatggatttcacgaggttgggtgacagtcatcttagggtgaggagattgattattctgtttttctctttcatcgatcaacaatccagcccttctcatctcatcatttcatttctgcacaaacttgtttaagaaataccaattaagaaattaattaagaaattaatgttgtaatctgtttggctgaagatatttacaaattttgtgctttaattatcttccaacaaatgtacatgtctctggtagacagcttgcgaccatctggatgactgatccatatttatataattttctttctttacctaatgagaccaaatccactattatcttcaacgaaggatgtaaagatatgtcagtgtcagtaatgtgacttattttatattctctggtcataacaaaaataaaccgccccttaaataaaaaggtcatagagttgcaaacacacacacacacacacacacacacacaaaatcatattttctaagtctcctaattacctttttatggaaaatgataccatatgcttttttcttaaagaaactacataaacttataaactatactaaactacacatttcaaagtctatgaatggaaatgtgtatcttattatattttaattcaattcactgtaaacttttctgtcaaaatcttatcaagcaaaactgatccaggatatttacatgaattctgatggaagtcactgtactgtgttttccataaaataccagtgggattctgataaggaagtttatgtttgccattgtgtttaaatagagaattctgggccgggcatggtagctcacgcctgtaatcccagcactttgggaggctgaggcgggtgtatcacctgaggtcaggagtttgagaccagcctgaccaacatggagaaaccccgtctctactaaaaatacaaaattagccgggcgtggtggcgcatgcctgtagccccagctactcctgaggctgaggcaggagaatcgcttgaacccgggaggcagatgttgcagtgagccgagatcacaccattgcactccagcctgggcaacaagagcgaaactccgtctcaaataaataaataattagagaattctatttacaaatttcctttcttggatctagttagggctcctttatatggagtgatttttattgttttcatagaaatacgtagaatctgggtcttctctaactttcttacaggaaagcaatgtaataaggtttttttttaattttctgaaagttatataatgttattgttccctaaagtttaggacctgccttttaggctttccatttcaccataacttttggtccttaaagtctgtaattgaagttacagtgtgttatgatgtaaatttttcttattattacctttaatgttagggtaatgttaactaatgttaatgttaggtatatggttgtttttttcattccttcgttcaacaaattgtctttgaaacccatgttacaaagcactctagagtcaggttgaagactattaagaaaggagaatagaaagagacactagagtaataatttggatttaaatttgatttccttgtgtatgatagtgaataagtgtgaataagatgaggcagtgatcacacatcactattagtaaaagtgtttctgtacctgtatccacacttttatgtatatggttacttatgttaaagtgatacatattatataaaattaacgtatacattaagtagatattttaatagtctgtaattaaatactactagtattttctttcctccttcaagtgcttacttttgatacctcgagttacagtgtcataaagattctttagaaatatattgactgtcttttaagagcttttgatacaatactgagtttacattcatctgttatttattgaacacttgctggtgaaaggcatcagtgttatctgctcttagggaacaaaaattaaaaagggataggccctaattttagagtgtatcctctataagaaaaacataaaagatagggcagtcatggccacaaaagaaaaaagtgttatggtggtttcaatcatatatgtattagaatgaataaatcaactgatcaattgtgatttcttattctaaatatgtgcctgcctttttcatatagatgaaaattaagctatgtttatctttccagggatcttgttgatttttattcaataacttgggagtgaaagttgatttttgcatatgttttaatgtttttaaatttcataaatgaattgatcagtaatttccaaggtagtaatggctgcattgtttttgaaaaaaaaaaagcaacaggatttgattgtgcttttatgatttttaaagaattcattaaaaataatgccacggtttctaaaatgatttgagtcaatttcttattcgatttataaaaataactttgaatacaattttagtaattcacaaatgctttcagttcccttacctttatattttatattctgtgtaaacaagtgacataatatttaagaattatatatctcctatgatttattcaagaaaagaatatatactgtattatttatttcaagaacagaaatgctttgatttaactgtcatcttctctcttcaattatggaagcaaaataaactgtaatgaccaatgtaacccctcccccatatcaagttaatctatgttcaactccagaattatttttgaacactcaaactagaaattaaaaaaaattaaatccatgaagacgatttttgccaaaagcatatagataaattgagttgattctatacttaagaaagtggagaggagagagtaatttggagagagtaatttactcttaatcccatattttttccctaaatgtgaaagaagtagattgtagtgagagggaaaataacctgtagcaacttcattgaggctaagctttctgtcatgttatattatacgaaagtaatgaaatgcttccacagatagaatcagaagtcccctctgagaaattctacataaaaattagcctgccactttaccacacttactcaagtttgatttttttaagttatgtaatagatgttaggcactagaagaggacatttactgggggcaaagatcagtagttggaaagaatgcaagcaggcaagaagctatatataatgagattttacagtacaattgttttctaaatgaaaatgaggacgggtccagacacaatggctcacacttgtaatatcagtgccaggatggaggatcccttgaggccagaagttcaagagcaacctgggcaacagagtgagacttcatctctacaaaaaaatgaaataaaaagttagctggctgtgatggtgtgggcttgtagccttagctactcaggaggctgaggtgacatgatctcttgggcccaggagttcgaggctgcagtgagctatgatagcgccactggattccaacctgggcaatggaacaaaactccatttctaaaaaagaataaaatataaaactaaaataataaataaataaaaatgaggatatattttattttaacatttggaaactttgtaggtgaggaccatgcaaacattcaaggtgtgagttctgaccaaatccaattattaaccataccaatgacttaaggtttcttcacactccttaaagttgattaatataatgattatatagttgactggtatgtcacagcttgaagcctttgagatttattcctgccttttctgtaaaggttgttttgttaattccagtatgtactggtcgtttttgttttgttttgtttttgtttttgttttgtttttttgagatggagtctcgcactgttgcccgggctggagtgcagtggcacgatctcggctcactgcaacctccgccacctaggttcaagcgattctcctgcttcagcctcctgagtagctgggattacaggcactcaccaccacacccggctaattttttttatttttagtagagatggggtttcactatggtggccaggctggtctcaaatacctgacctcatgatccacctgccttggcctcccaaagtgcggggattacaggcgtgagccaccgtgcccggctgccaatatgtattggtctttttcatcaatgattcagtccaaaatcattttgtcctttaactatatattttcttgtaaagctgcttctgttgtcttgaacttttcttttcaaatgtatgttgtcatttgactttttagattgttattttctggtcctcgaaataaatttaaatttcctgtaaaggaaggtgtaatattctatttgacatagccgctaaagatgtactaggtgctttataaatattgttgatttactttatcttcacagattactagttttacttagtatttggaatatgacaacattttatagagctatattcatatatatgtttatcttaactgttaaatgcaatatgattcatgtcttgttttggtcaatgatgaatgaaagtctcctgagaattaaatttactgcatcgatgcaaaaacaatcataattttagacactctaagaattttagaaattaaaggattttttttttccagtttactctgttaagattgtgtttagctatgcgtgacagcattctcactacagtggcttatccagatagtttctttttctcatagagcaagacttccagaattatgtgttccagggtcagtgcagcacctccaaaaccgtatgtcccaactttttcctccaaccccagtcatctccaacatgagactttctttttgttttgttttgttgtttttgtttttgtttttgttttgagatggagtctctgtcgccaggctggagtgcagtggcgcgatctcgactcactgcaacctctgactccctggttcaagggattctcctgcctcagcctcctgagtagctgggattacgggaacgcaccaccacgcccagctaatttttgtatttttagtagagacggggtttcaccatgttggccaggatggtctcgatctcctgacctcatgatctgcctgcctcagcctcccaaagtggtgggattacaggcgtgagccaccgtgcccagcaagactttttttcctgtggtctcaacatggctactctgcctccaggcactatgtctgtactttaaaatggaagaagggaaaatggggaaagtaaaagcatattccagctgtgtcagctcctgtttgtaaggaaaaccagtgcttttctggcagccccacacagaagagtttctacttgaacagtgcattaaccagaaatgtgtcacgtgaccattcctaacttctaaggatcttgggaggattgagtgttttaactgaataggtgtgtttctttcttcataattcaaaatgtgaaaattggtaacttagttataaaaccttgctagtctgaacagaatttggatttttttagctaagaaggaaagaaagggtatcggataggcagctggctatgctagccaagatactcttaataatgcacatttttcttctttggacataagcagttttaacttagctaaatatgatgtgattgttttcctgtcttcttagttctgtttaaatttgtttcagaaatcaaggaaataaaatggagaaaaaactctattattcatgtctatctttctgcctctgaatatttttatgttggagaaagagaaagcagtaactttcataatagcttacatagtctgacaaattctaaacatgtccgttagcatcaatatacgtggtattaggtcatcagtttttatattctgaattattaagacccaaataaacccactgagttcaagagaaagtatacactgagcaataaaaacattaccagttctagcaatgataatcaaacaagaaaacaagtaatatagtctgtttagaataacatgttttaaagatcaagtttttcttccttaccaatgttgcctttcttgtaacacttttttttccttcttgagataggctttcctatcttttgtcacaaaccccaatatttacatggccattcgtagtctattcatagcagcaccaccccatggcccaaacttgtagatattgccctccttctatggttgttctaataagaataaccactcttgtctctcataatctcagctgttttgtgccgttaaaatggaaaataatgagtattaagatactaactaggggccaggcgcggtggctcacgcctgtaatcccagcactttgggaggatgaggcgggcggatcacgaggtcagaagattgagaccatcctggctaacacggtgaaaccacgtctctactaaaaatacaaaaaattagccaggcgtggtggtgggtgcctgtggtcccagctactcgggaggctactgcactccagcctgggcgacagagcaagactccatctcaaaaaaaaaaaaaaaaaaaatactaactaggtttcagtcatatgagatgaataagtcctacaaatctgtacagcctagggcttgtagttaacaatgttttatatttaaaactttgctaagagagtaaatctttttttacctgttattatcgtacatgcaaaaataatagtaaataaggaaggtaagagaaaaattttggaggtgatgcataggtttatggcatagattctggacatgatttcacaggggtatacagtcatgcattgctcaacaacagatatacattcggagaaatgcatggttagctgattgatcttgttgtgcaaacatcatacagtgtacttacacaaacctagatggtacatcctactatacatctaggttgtatggtatagcctattgctcctaggctataaaccagtacagcatgtgactgtactgaatacttcaggcaattggaacacgatggcaagtatttgtgtatctaatcacatctaaacatagaaaagttacagaaaaatattataatcttataggaccactgtcctacatgtatacagactgtgcacatgatagtggtccattgatcaaaatgtccttatgcagcacataactgtaattatctcgaaactcatcaagctgtgttcattaaatgtgtatagctttttatgtcaataaagtggttaagaaatcaataaagtggttaaaaaatattttgactaggaaatatactatcatttctagttgataaaagatctcaacatttccaaaattgtcctacagaaaaccaggttcatcaggtgttcatacatgatcctcatgaaaaggtcaaataagctgaaaaacatgcatagacgttgcctatcctagcaatctatgatgtacatctccatagtaaggtcactgaaaagtcttttaggaatgttagtattgttagctcagtatttctcagtgatttctccatggaaaccatttgtgtagagcatcttgaggagcacagctgagagaacattatcttagttggatgtgtatgtccctctgagtcacttgatttctctacatatgcttttaccaaattaatcttttagaaatcttttctcttcgcactatgtctataatttgtgaagttgttaccaggataacatttgtgcctctcaccatgatgtacctaccagggtccaagcagccattccttctctagagcaactgtctgagggaaagaatttaacacagcattctacgaaatcattttatttataaaaatagattactgctttacatatagtaatttatatttagaatattgattaattattaaaatctgcatgagagctttaaagagtagtacataatatatagcagtttgtactcaaactgtcttctaaaaaggattcactttttgtttgtattctattgtcctattcgttgatagtgttacgtaagtaattataaaacttaaaatctggaaagagaatgtggactcagaatgccatctcttttgttatttcaaatggattagaaatgaacatacatattcattttctttcattacacatccagagaaatagaatggattttataaatatgtaaaagcaaggattttgatcactgataaaaagggaaggtttggtcactaccttatttcattccttttttcttatccttttttttttttttgtcaattatttgatgacatctctgaacatcaccttttattcatgacaagaattgggtatcatggtaaagaacactgttaatataattcagttacttcaccccctcctgaaatatagagaagctttaagactatgtgaatatttttttctggttttcttgtatttgtagaaatagcatgagctttgtttaaagtcaggcatctaaaaccttgccctgtatgttattgacaacctgcacaaattttaggatctattctattacagtttgttcaactgtaaaactaggatagcaaactctatgtcatattttcgttatcagaatttaaaaagcatgttttaagatcttagtaaataataaatctctactctgtagttgaatttgttctatattctttaagaaattccctttgatggttatgccaacctctgtattacttttcttcacactttaactttgcgctgaaatcatagtagtattttacgttatcagtcaaaataacagtcatccttaaaacaaatatgaattttagatgattaaatagatttgtatggaggttcttcttgctaatcatagcagttatccttggtgaaaaatgatagacacttgaaaaaaccaattaatcatgatggctatttttgcatcataaataaagctttcaaatttgagagggaatcaaaagggcaatggtagtatagtgtctcaaagcccctttccaattgatggtacaaatttaaaaagagagagagagagagaaacatgtttcactgtaattgttttctaagagcttccaaaaaagcgtattttcttaatagattcaaatttttcagttggattgaaagggaagtcttggagtgtagtgaggagggcaccttctgttgagaggtgttcagacgacagagtgtgcccaaggccaaagatgagatggttttgcgaaagtcagtggccacaaacaggtgtgtttgacccctgagagatatgcaggaagtctaccccactttaattcttccaaatattctttaccttaattcccaagtacttgataaaggagcaatggggagaaaatatgcacactattatggaaaagttttgacctacactttggagagttttagattaagagcattctagaaatcagtcccaaatgcctagggtttacttacttaaagataatatcatagtttgggtgactgggaagcataccctgagattgaggtgagcatgcagtatgtctatttaggagtgttcttggggtcaacgtgtaggggcagagggagaagttgagctctgacgcagtcttagtaagggcctcagctgaccgttcagggagttcttaagctggaatgacccttcagaagtgctaggaaacgaagaaaggggactggatctttataaccccgtgtcaagtcatgcactggatgtgggctactccaggaaggcaacgaactttagcaagatgattctctttagccacgggaatttccataagggggctgctatggtctgaatgtttttgtccctccaaaatgtgtatgttgaaacctaacactcaaggtgatggtattagaaggtgggggtttgggggggtgattaggtcatgcgggctctgccttcagaaacaggatcagtgcccttataaaagcggctccagaaagcttccttgccctcccaccatgtaaggacacaccgaagatgccatttaacaggagtgggccctcaccagacaatgaatctgctgatgtcttgatcttggaattcccagcctccagaactataagcaataaattctgttgtttataaattacccagtctaaggtatttagctatagcggcccagactaagacaagggctgacagctgaaggctgtctaccagcagcactcctagcagctggggaactaagtccttcatttccaaaggggaatctaggcagcatatttacagcttttcactacagataagctcattatttcaaatagggactagcaggaaaaaattaaattgcccaaaatttagtgggatgctgaaatagattgtggtgtgtaaattggagtatagtgaggagagcaccttcaaaccagtatgtactacatgatattgtttttgttgcaatatttattatatacccaaacacacatatattacttttagaaacacacaccacatatatatctatgaatattttatatacacatagggaaggattgttgatgttatttatgctattttaaagatcgatgttttcatataattatgtattggttatatattatttcttgatataaggtaaaaaaaaaaagcaaaacaaactttaagtgatcactatgaaaagaatcccaatgctgcacatttaggtttatccaactcttcccattaaaatattaaatagtagaaataattgtgaataagaaagagcagattttgaaaaatggaaagaaatgcttaaagacatagcattgttgcccaaccatcattatttaaacatacagtgtttggctttgaccaaattgccttcaaacacttccttttggcccaaaatgttaggtcatatatactaccataaaattcatgatgcttaccatgcattaatttctagtatataccaggcattgtgctatgcatatcatattcaatatttctaatcctctcaaaagtggtacaagctaactggcgtttttcttgttttgaaagggagaaactcagagaggttaagtgacttgcccaaggcaatgccattgataagtgccagattctatcacaggtttattggcaacaaaccatatgtgcgcgtgcatgcgcgtgtgtgtgtgtgtgtgtgtgtgtgtacacatacacgaataacatatatggtataaatacgtggaaacataataaactgcattgagctgcgtttataattagtatttaggacatgtttggcaaataaaaacagtggagattgaaatggatttgcttaggaaaaatgatacattaaaataggctttattatgagtcttcaactattctgtgaaaatagatacccagggaagaaataatagagaatatgaatcttgagcaggcaactgagaacttgtcgaagagccaagataaaaatgtcagagaggagaatattttggcagctcagatgagcccccagagggtgggaggcaatgatctcaccgcagtctcgtatctgaaccccaggtttttgcatctccataaagtaatttcttacacccctcaataatgatcgggcttactctcaatctctcgctctctctctgtgtctctctcacgcacacaaacatgcagaacatttcttgcacatgcataactcataagacgattatgtaaataccagcctttttatttcataactaaattacaaggcctggttattgtttggactgtgaaaaaataattatgtgaataggtgcctcaagatgaaagacaaggcaagattgtgaaattattcatatgatagtaatagtatgcaaaaaataacacaatctttaaagatctttaacgacctagttataaaaccatgctttataacaaatataaccatgaggaaataaaaagaaaaatgtaataatatactccaagaataaagtcaaatgtattgttgaatgtaaggagttggttacacttccttatagtggaggttattttaaaatttgtggcttacgtggtgttatgaattgccctagatcaacactattatgcaaggccaactattaggttatttttggtagataaccacagcaaaactttagtataataggtaaaggttagctacactcccataccctcactctcaggtgttgtcatactccgtataaaaggttcaatcaagggagacatgagaatattccagaatctagaggcaggatgcagttaaccttagagaaggcatcagacaactagaatcttcggattcaatgtggaaacaaagcatagtttaggcattaaatcttgggcaccattccaaagaatacaggttccataacttactatatttttatacctagcaagctagagatgaggaattgctctcaaatattttaaccaaagcatgtatcttaagtaacactaatctcataagtgaaaactcatttctaatattcattttgctcattagcaaggcctctagtgttgactgtgataaaaaatagttcaaatgctggtagaacccaccccaggagactggcctttctgattaaattctaactctatccccacgtgaattcctgacttaagtaactgagttcctgcacatcagaatataagtatattatagatataaaaacatatgtaattaataaatattttaagtgagacacttctttcatctttatggcttaactatatcagacatttgattatttttagcggtctaactacaaaacaaaacacaaagcccacaactaaaaatttctttgtatatattgcaaagaggcaaccatttggtgtcaattcaatcatgagtgaaatgctattatacgagtacatctccctggcttgtatgggggtaatagggcatggaatttacagattcacaataactgagatattcacaataacaaagatatcaatatgtagcttttcccataactttgtgtaatgaaatcctcagtttgtgctgtgtaaaaagcttattgtttacttctcatgaaaatcatcttagtttttatctttatttaatagtctgtaatttgggggtaatacattcgttttgttgatactatgtgaagtggcaagcagaaaattctaacaggaatagataagcaagtatcctataaatcagagtcagtgtctctctctctctcttttaatgagtcagtctgtctctctctctttttccctgcctggctatctatctgtatttttcagttttgctttgcaaataagagaattgtgtgttgtaaaccaaccaacttaccattaattttctctgaattcaaaagcaattacaagcggactcttgagtttgtgctgcctggttgtctgcatataggccagatgtctagaataggatctttatttactatttttaccctcctaatttcatggtaactccaaggtagatgatatttgtaatcgtacactacttgtcagaaatctttctaataacactgctattttataaaaataaacattaattcagtataaaattttattttaaattgttaattcaagcaaatcagtgaggtaacttttacactgccgagcgtacgtgtgtgtggattagtacagccatgccatagacttcacttgtaatcttttctttatattttttatacacctgaaatgttcatcattgtgctgtagaaaacaatctcattgtgtttttaaaagctagagtgggtattgagaaggggaagaggatcatagaaaaagttggttaacatgctacttaacacttcaaatctttactcgatgtcatcatcagcaacattttaaatttatgcttctactagtttgcagttcttttcctttgattattcttatgatacaagcctttccacacaaaatttatgtacaggaattgtgtagaatttttctttggaaaatatggtgatttattacaatttgggcaacatcatcattttaaaaattcagaatttgatttttctcagaatcatcagaaagaataaagcatatatatggttcatgtcaggagaattagaacatgagaattaatatatctctgatcttttaaaatattttcatgtttgtgaatcagcagatttttcctagtttgagatttaaaaaatctagatataattaaaatctcactgatgtttcaccatcagatgattttatatttgtattttcttccacttcataacttgtatagagaagaatagaagaaagaaaaagggaggattgataatctttctctctcagttcttatagcacttcattttttaaacttattacttccttctgcctgctttgtttgtctacatgtttgtatttcatgatttcttagaaatccatctactgccattctgaaggtcatttacctgaaaatgatagaaagcagcatatattcaaacaactgcagagtaattgtctatatcagttatcattgttcattacttttctgttttaggattgaggggctgcctcgccacctccctcacacccccagcatattatcacaaagcctactgattcattcacatccctgggctgaatttgccacccactgtgtgttcctgttgttttgtgtatggaagtgaaaagatttaatttgatgttgttgaaaagacacagaggctaactttcaattttcatatgtagttcttccctctccctctgcaccacctcctttacttgttgagaaaattgccctctccatggtaacaatagaagaagctttcagattttagtagtagttgttgcagagaaaagaattcaaaaagtagatgaagtttaaaaatgaaaaagagagaggaagacagctgggaagaaggcttaatgtttatgagtgggtgtggaggggaagaactaagttgaatgaacaaagctgagctaaggggaagatggtttttctgcatcccagaaggcaataccctagcctttcctgcagccttcactccccaaaagataagagctttatctgaaattcttataggattcattcctgaagagcagcttgtcaccaaacagaaacactgtgatttcctcagggagtcacagtttattattatttttttaatgtaacgcttttgtgaactccagtttccacctcaattcaaatggtcttttggttacagggtgaaagagacccaacaatacacctttcccacttccggaggcctttggttaaaccatgtctgccacaaggacacaggagcctggtatgactggttgttttttgtttgcttttttgcctcctgtgctttctagattgtgagatactgtaactcttgtcgatgacacatagtaccgaacccacccgaagaagtatgtcagtatgtcacattgtgacaaacagcttctcatgctaagtaaatgcagaaccattgtgaaaggtttaataatgcccactcctcccccgccaaagatgtccatatcctaatcccaggaacctgtgaatatgttaccttacatggcaaaaggctttgtattaacagatgtggttaagttaaaaatcttgacacggagagatagcctgggttaccccagtgcgcccaatgtaatcacaagagtcctcctaagagagaaggaggtgatgatacaagcagagtaaaagagagattggaagatgctacactactggcattgaagatgaaggacagggccaagagccaagaaatgcaggcaggctctaaaagctggaaaaggcatggaaaagaatcctcccctacatcccttagagggaatgcaagctctgccaacacattgtttctagcttgtgagacccattttttggactttggacctccaaaattgtaagataataaatttgggttgttttaagccattaagtctgtaatcatttgttacaacagccacaggcagctaatacagccatgaacatttagtaatgactaactttgcacaattttaatacaagcttcttattaaggtttattttttcttaattacaaggaataaaagtggggtctgggggcaatgtcatggtccactccgttttagccatatgaatttgtatttccagcattagaacaaaaggtgacaaatctgaatgtatttgtgtgaaataataataaagcagaacaaaaagggaaaagtgtccagctggaaatgaagttagagaaagatgaggagaagcaagccaattgtgtagttttcccttctgctttttaaaatcatgatttgtttaacccactgaattctattttagaaacaggactgcaaggaagtgttgatggatttggtggcatgagaaccagagtcacagaggcaggaaagtaaggaataagtgttagaataggaagcagagttgcttgggaagagaccttatgacatgtggacagggctagacttaggagtcagaaagacctgagttcaaatgctatcctttagtatagtttgaagtcaggtagcgtgatgcctccagctttgttcttttggcttaggattgacttggcgatgcgggctcttttttggttccatatgaactttaaagtagttttttccaattctgtgaagaaagtcattggtagcttgatggggatggcattgaatctgtaaattaccttgggcagtatggccatttacacgatattgattcttcctacccatgagcacggaatgttcttccatttgtttgtgtcctcttttatttccttgagcagtggtttgtagttctccttgaagaggtccttcacatcgcttgtaagttggattcctaggtattttattctctttgaagcaattgtgaatgggagttcactcatgatttggctctctgtttgtctgtcgttggtgtataagaatgcttgtgatttttgtacattgattttgtatcctgagactttgctgaagttgcttatcagcttaaggagattttgggctgagacaatggggttttctagatatacaatcatgtcgtctgcaaacagggacaatttgacttcctcttctcctaattgaataccctttatttccttctcctgcctgattgccctggccagaacttccaacactatgttgaataggagtggtgagagagggcatccctgtcttgtgccagttttcaaagggaatgcttctatagtacaaggctacagtaaccaaaacagcatggtactggtaccaaaacagacatatagatcaatggaacagaacagagccctcagaagtaacgccgcatatctaccactatctgatctttgacaaacctgagaaaaacaagcaatggggaaaggattccctatttaataaatggtgctgggaaaactggctagccatatgtagaaagctgaaactggatcccttccttacaccttatacaaaaatcaattcaagatggattaaagacttaaacgttagacctaaaaccataaaaaccctagaagaaaacctaggcattaccattcaggacataggcatgggcaaggacttcatgtctaaaacaccaaaagcaagggcaacaaaagccaaaattgacaaatgggatctaactaaactaaagagcttctgcacagcaaaagaaactaccatcagagtgaacaggcaacctacaacatgggagaaaattttcgcaacctgcttatctgacaaagagctaatatccagaatctacaatgaactccaacaaatttacaagaaaaaaacaaacaaccccatccaaaagtgggcgaaggacatgaacagacacttctcaaaagaagacatttatgcagccaaaagacacatgaaaaaatgctcaccatcactggccatcagagaaatgcaaatcaaaaccacaatgagataccatctcacaccagttagaatggcaatcattaaaaagtcaggaaacaacaggtgctggagaggatgtggagaaataggaacactcttacactgttggtgggactgtaaactagttcaaccattgtggaagtcagtgtggcgattcctcagggatctagaactagaaataccatttgacccagccatcccattactgggtatatacccaaaggactataaatcatgctgctataaagacacatgcacatgtatgtttattgaggcactatttacaatagcaaagacttggaaccaacccaaatgtccaacaatgatagactggattaagaaaatgtggcacatatacaccatggaatactatgcagccataaaaaaggatgagttcatgtcctttgtagggacatggatgaaattggaaatcatcattctcagtaaactattgcaagaacaaaaaaccaaacaccgcatattctcattcataggtgggaattgaacaatgagaacacatggacacaggaaggggaacatcacactctggggactgttgtggggtggggggaggggggagggatggcattgggagatatacctaatgctagatgacgggttagtgggtgcagcgtgccagcatggcacatgtatacatatgtaactaacctgcacattgtgcacatgtaccctaaaacttaaagtataataataataataataataaaatctcaaaataattaaaaaaagaaacaaacaaatgctatcctgatcctaactggctggctgtctttggggaagttggtaatcttttctgtgcttatttcctcatgtgtaaaaaaatgaatatagtacccagctaggtagagttgttgttgggattaaatgatgactataaagcatctagcccagcttcggctacattatagctgcttacgaaattgtagttacgatgtaaaagagaaaaacactggaaaaggaggatatgggccattttattccaccttcaccaccttttagcttggtgaccttgggcaaattatgcttcattccgtgcttcattttccttgtctataaaagggtgtaagtacagaaccattgaggggtggtcattattaacctacctcaaatggtgtctgtaagttaatatatattgtgcttttcctatgtacaatatctagcacataattacaaatcaaatccatcccatgtgcaatatctagcacataggaaaagcacaataactagttattactcttgttgtagtaattgctacgctgtaggagtttgaattgtaaggcagtggagagtcactgacctttacgagaaagtgtagcagaacatttgagtagatagtaatggggaatattacataaatggatagatattaggggcagatattactattaaaatattacagcatggatatttattaaggccaaactggttaattagttgcatctctcaggttcctaatgttgcttaattttttaacctcccattttgtgctgccctttgtacgaatatttaatgctcccaacacctcttcagtagcacatgtactgtgagtttgttttgttattacttgtgtgtattagcattcctttgtgaaccaaaagcatggaattagctgttgcctctaggctacctagttttgtagtttggattgaagccttcacctcagtaacacctattctgtctactatcttacagaaaacttgtaaaattaagacagatcattaatatagcagaaagagacaaagggcagagaacattgagatactggatattggaaccacccaatagtgttgatttatttatgattatcagtttttgtctctgcctagcctcatgccactaaagtctctgaggcaacaaagaataagcaattttgctcaccttatacaaataaaacacagaaaaaggaatcactagagaaatggtactgcagcctttctgcagggattactgcttatttttaaattacttaaaaggtattgaaattattgttcataatgagaaacctgcctaataaaacagaaaattaaacttaacacttccctataatgtaaacagctcggttaggaacacaacattacagaaaccacttaagaattgattgtacttgttcttggagcagaactagaagctcaccgtttagaagctgtgcacatttccctatcaaacagtacataaagtttccatattcctcagaatcggcttcatttgtgccatgtgtttgcttggaactatgccacagaaagcagttctccccctcaagctgggctcctttcatgccgcagtgcaagtgtgtgatatactggcaccatgtgctaatgtagacccatttttatatgataagaattagtacggcctagggaatagacaagtatgtctaaaatcctccccatagaatatgtcccttcctttaaaagctgtcatactgtaagttccagctgagttaaaggccactgtgctcctatagggaaatatattctattgtaatttttacgttctccaataacagtctgttctttgtttactgaagagagctttcatgtcataaaatggtgttttttgacagagaagcagaatcattgttttattatagaaatttgctcttacaacagcaaaaataaatagctcatctcttaagctcctgatcaatgtctaacacctcctacccccagcaacacttcactgcaagtatattaacactctataatagcaattccactcacctaccaagaaatgatcttcacaaatgatttacagctaaaccagagcttaaacacatagcacccaatcaagggcagatttttatctttttcccagtcatataagttctgagaagaaatagattaatgttgatctcccagacaactgctgagaaaatgtacaaaggatgttgtttattttgaagaatgagacctagttgttaagcactttttccccttatatgtacgtccaaaggtaaccattacaccattttgatgcaaatttaggatatatatttattcatacctctcttctccattcggatgttgtctgtgtgagtgctcacagacacatgcacacatacacacatgcactcctgtttcacacttatttgtaaaactcacaaggatttccaagccattaatatagcattgtttaaggtgaacacatggttgttcaccatccatatgtatcttcactttgtagcactcagaatttggcaaaatcagaaggctgaaacctcatggattaaatatattctatataacatatgtcttaattgctgttactgtaaagaaacctggactagccatatttgactaatttctacctaaggtatttgaattcttataaatagattcattgctttaatcacacaagagtggtttatatgaatgtaattatctccactttatagctgaataaactgagcctgattctatccctatatgggaaacatgaattgaacagctgtgccaattattttgataattcaaatttcacatctaccatgtgaagacagcagaagagggttagggggcttgaattattctgattaactgtgttcatgagtgtaatcgcctctagataatcactcatttcttcacttcacttcccatctacaggtagtatcagcgaatggtaacatctcttgctttgcctcagtttattgatggctgccgttagaaataaaaagcatggttttgtttcagtacttaaatgaataatatcttcaaaatgtttttaaaacgtgaaaaggttgaatgcatttttaacaaatgttttgttagctttgacttttatttttgaacagatgagcacaataccccagtactcctttcctagaaataggagtactacctgaagacttatttcccaaagaaaaatatcaggtctagtgcagcaatacgtattaagggcattgaaaagttatattcacaaaatgtgacatcataacatatgttaatacttcttatcactgataataatccttgaagttgtatttccagagagatctcaatttcttctcacactctgaaagtctctgtttatcctttagagtaggaatgtaagaatttaacaaaacattctgaatgtttaccttttttctaaactgaaactacaatccctttttacccctatatagtaaaatataatattacaagtagaatcagcaaatttgtttaataattctttgggacagtttttacaagcaatggggttgaatttatgttccttgtgtgcagtggagttattatattcttcttaaaaagatgcatgaaggtaaattagaaatgttttacatgttttcatgacaggacatttaatcaaagaggagatacaagaggcttttcttgggttactgcaatttaattttccatttctttcttggaagggacattggatgcagttgtacgaggttaatatttctaacatgccacttttattgtggcattcttctgctctcaaacctctgatgatttcccatggccttcaacatgatgtccttatttgggcatctagtgttctgagccctcacattctggccccagcttcccttctcaacttgatcacagccatcgtaattctgctaactaattacacagctgcccttcccactctttctcaaccactctgctgtattctgacttctacactttagttttaaagctactccttgtcctgaaattccttctcccattaggtcattattaattgagttcatcctctaagttacagttcatgttgctgttcctctatggcaccttccctgaacctggtcccatataaaatcccatctctcagaatcccattagggtaggatatgtggtctgtagactattacgtttgtcatttacatattgtcttctattattgggtaactgcgtgtgcgagcatgcatgggctggcctgaaggtcacctccccaactgcattgaaagttcatcacaagttcaattatttcactagagagtctctttcatgtcatccatgaggcacattccctactgtgatgtgttatgcatacaattatttcaataaatattttctagctctttgattgaccaaagcttaattacctgtcaactctagcctcttgtatctggaatttctacagtctttggatagtatctttaggatgcaaaattaggaggagtatgtaccaggcaaactattacaaataatgccctcaaatagttacatttcactattcatgtcttgtaatttatcttctgctttggtattttagtacacttatgattcaatttgctgtatagattcctctgaatagggacaagagaattcgtcttgataagtggaagttcgaaggattccaaaatgatgttattcaaggtagaacaagaaattaatactgaaaaaattgaggagtaataatccccaaatatgtacatgcgtatctcgttttattgggtttcactttattgcactttgcagatatttcactttttgtaaattgaaagtttgtggcaaggctgcattgagcaagtccgtcgggcacaatttttccaacagcatgtgctcgctttacgtctctgtgtcacgttttggtaatttgctcaatatttcaaacattattattattattatatttgttatgatctgtgatcagtgacctttgatgttactattgtaattgttttgagatgtcatgaactgcactcatatgagatggcaaactttgtggggtgcagtggctcacacctgtaatcctaacactttgggaggccaaggcaggaggatcgtgttagcccagaagtttgagaccagtctgggaaacaaagtgagaccctgtctttaaaatatatatgtagaaaaattaactgggcatggtggcacatggctgtaaggagccctgccagctgcatgggaggctgacacaggaggatcacttgagcccaggaggtcaaggcggcagtaagccatgttcactccagtgccctccagccagaatgacagagcaagaccctgtgtggaaaaaaaaaaaaagacaaacattttttcaactttgattttagattcagggagtacatgtgtaggtttattaccttgatatattacatgatgccgaggtttggagtacaaatgatactgtcacccaggtactgagcatagtaaccgatagttagtttttcaacccttgtttccctccctccccactctagtagtcctccgtttctattgttgccatcattatgtccatgacaacgcactgtttagctccacatgagaacacgtggtatttggtattgtgtttctgcattaattcacttagaataatggcctccagctgcatccatgttgctgcaaaggacatgattttgttcttttttatggctgcatagtattccatggtgtatatgcaccgtattttctttctccagtctgccactgatgggcacctaggctgacttcatacctttgctattgtgaatagtgctgaaatgaggatgagaatacatgtggttttttagtaaagcaatttgttttatttgggctatatgcccagtaatgggatcactaggttgaacgatagttgtgttttaagtcctttgagaaatcttcaaactgtttcactgtggctgaactaatttgcattcccagcaacagtgtatcagagttccctcttctctacagcgtcagcagcatctgtcatttttttgactttttaataatagccagtatgaatggtgtgagacggtatctcgttgtggttttgatttgcatttctctgatgttgagtgatgtggagcattttttcatgtttgttggccacttgtatgtcttcttttgagtagtgtctgtttatgtcttttgcccattttttttgatggggttatttgtttttgacttgttgaattgtttaagttccctatagattctgaatattagacctttgtcagatgcatagtttgcaaatatattctcttattctgtagactgtctgtttactctgttgataaattctttcactgtgaagagctctttagtttaattaagttccacttgtcaatttttggttttgttataattgcttttgaggacttagttataaattctttcccaagtctgatgtccagagtggtgtttcctaggctttcttataggattcttataatttgagatctaatgtttaaacctttattccatcttgagttaatttttgtatatggtgtaaggagggggtccagttgcattcttctgcatatggctaaccagccatcccagcatcatgtcttaaatacagagtccttttcccattacttattttcataagatggcaaacttaatcaatcaatgttttgtgtgttctggctactccactgatcagccattccctcatctctcttcctctccttgggcctccctattccctgagacacaacaatattgaaattatgccagtcagtaaccctacaatgtcctctaagtgttcatgggaaaaaaaagagtcacatgtttgtcactttaaatcaaaagtcagaaatgattaagattggtgaggaaggcatgtcaaaagccaagacaggctgaaagccagacctcttgtgccagttggccaagttgtgaatgcaaaggaaacgttcttgaagaaaattaaaagtgctactctgttgaacacaggaataagaaagtggaacggccttatttttaatatggagaatgtcttagtggtctggatagaggatcaaaacagccacaccattatcttaagcaaaaggctaatctaaagcaaaggactaattctctgcaattctgtgaatgccgagagaggtgaggaagctgcagcagaaaagttggaagctagcagaagtatgttcatgagccttaatgaataagccctctctataacataaaagtgcaaggcagagcaacaagtgctgatggagaagctgcagcaaactatccagaagatcaaactaacatctaagttaataaaggtggcaatactaaacaacacattttcaatatagacgaaacagccttctattggaaaaggatgccatctaggactttcatagctagagagaagtcaatgcctggcttcaaaagttcaaaggacaggctgactgtcttgtgaggggctaatgcaactggtgactttcagttgaagccagtgctcgtttaccattccaaaaatcctagggcccttcaggttatgctagatctagtctgcctatgctctgtaaatcaaacaacaaagactagatgactgcacatctctttacagcatggtttgatgaacattttgagccctctgttgagacctacttctcaaaaaaatgtgtctttcaaaatattactgctctttgacaatgtccctggtcacccaagagccctgaggaatatgtccaaagagaatgattttattttcatacctgctaacacaacatccattctgcagtccttggatcaagaagtcacttcaactttcaagtcttattacttaaatcatacatttcataaaggtatagctgctatattgtggtgagtccactgatggatctggataaagtaaactgaaaacggaaagtcctcaccattccagatgccatgaagaaaattcatgattgaggggaggaggtcaaaatatcaacattatcaggagtttggaagtagttaattccaacactcatcaatgactttgagggtccaagacttcagtagaagaagtcactgcagatgtggtagaaatagcatgagaaccagaatgagaagtggagtcagaaggtgtgactgaatagctgtaatctcaaggtaaaacttcagcggatccagagttgctgcttatggatgagcaaagattgtggtttcatgagatgcactctactcttggtgatgatgctgtgaacattgttgaaatgacaacaaaggatttagaatattccataaacttagttgataaattagcatcagggtttgagaagattgactcaaattttgaaagaagttctactgagtaaaatgctatcaaacagcatcacatgctacaaagaaatcattggctataaaggagagccaatcgatgcagcaaacttcgttgttgtcttattttaagaaattgctacagccatcccgaccttcagcaaccgccaccctgatcaatcagcagccatcctcactgaggcaagagcctgtaccagcaaaaagattatgactccctgcaggctcagatgattgttaccattttttttaggagtaatgtattttcaaattaaggtatgtacattttttagatacaatgctattgcacacttgacagatgatagtagagtgtaaacataacatttaatgcactggggaaccaaaaatattcgtgtgcctcattttattgtgatatttactttattgcagcagtctggaaccaaacacacaatattccaaggcagtcctatatattgtttcatgtctctctttcttctaaaatgtgtgtaggagaaaaaattatatcacttatgttactgggccataatatcaaaagcctgcgaatctgatgcacatgataaaaactggtcttaaacctgtcttgattatcctttgttaatatgccaaatttatagaacaatagagtttcaagaaatgtgaacaatgtagaataactaaaagatctaacgttgaatagctaaaattatcaacgccctttatatcactttagaaatgcgtttgcaaatcattatcaacaaattgtagcataaaattctttttttttcttgactttgaaattgtatttcaagatccgcaatttacaccacattatttacttactggcttgtgaaagtgaaaggcattttcatttttggatgttaagggttttagtaaatgacaagtaaatcaatcctttaagttccgtgtggtataatagcttggaaaggaccatcttaatctttttttcaacacagggagataatttattttaaaaataacacactaatagtagattaatattattaccatttcaaagaagtcaccaaatttggtaggcttaagaggttttttttttttttttgagattactatgctctttttttattttatttattttatatttatttatttattttttagttttttaattttactttaagttctgggatacatgtgcagaacgtgcaggtttgttacctaggtatacatgtatcatggtggtttgctatactcatcaacccaacatccaggttttaagcccccaatgcattaggtatttgtcctaatgctctctgtccccttgcccctcaccccttgacaggccccggtgtgtgatgttcccctccctgtgtccatgtgttctcattgttcaattcccacttacgagtgagaacatgcagtgctaggcttaagagtttttttaactccccaaaatatcaacaaattgaaacattactacaaagaaatagagaaataaatttcactgactgtcttattgttttttaagtttgaatagctaataatgatttcttaaacagctatcatattttttatttttaaagctagccaaatgatcagtgatttttataatactgataaatactgcttagaaaaggaacatgtgttctagcaatttccacacatttctgattctaattacttgtttctttttgttttatttttatatttttaagttttgtgagtacctagcaggtgtatatatttatttggtacttgagatgttttgatacaggcatgcaatgtgtagtaagcacatcatgtaaaatggggtattcaacccctcaagcatttattctttatgttccaaacaatccaattatactcttttaattaatgtaaaatgtacaattaaatcattattggttatagtccccctgttgtgctatcaaatagtaggtcttactcattctttctaactaattttttgtacccagtaactatacctacaccacccccacctccccacgacccttcccatcctcaggtaaccatccttctactctctatgtccatgagttcaattgttttgaattttaaatcccacaaataagtgagaacatgcaatgtttgtctttctgtgtctgatttatttcacctagcatactgacctccatttccaacaatgttgttgcagatgacagaatctcattcttttttgtggctgagtagtattccattgtgcataggtaccacatgttctttgtccattcatctactgatggacacttaggttgcttccaaatcttggctattgtgaatagcgctgcaataaacatgggagtgcagatatctcttcaatatactgatttattttcttttgggtatatacccagcagcgggaatgctatattatatggtagctctatttttagttttttgaggaacctccaaacggttctccatagtggttgtgctaatttacatttccaccaacagtatacaagggttcctttttcttcacatacttgtcaacattggttattgcctgtcttttggatataagccattttaacgggagtgaggtaatatgtcattgtaattttgattttcatttctctggttatcaatgattcagtgatgttgagcaccttttcatatgcttgtttgccatttgtatgtattcttgatctgccacaagtctctaattacttgtttcttgtaccactgtttcccttcattgtagtcagtgatttggtcaatcaacactttttacgtatgggtatctgttaactgtatttctaggaatggaccaagaattgagaaatttatcccaaccagaaagaacaaaatctatggaggcacaggattactgaaagctttgctcctatagcctcagtttttttctgcaagttcgctgcttcccagttgtccttgtgataaaattcaaaacctcaaactgatttttaaaaagccaactatatactgcttctactatgtctacctaaacttatttgccattatttgtaaagaattccaggctctaaccagcccatttgaggctttattttacgttcatgcctttgttcatgtctgtctttcccttataatgctcttctcattctctagccaaatctgccaaagttcagctgtagtgccatacttgatatgaagtctttgctgagaattcccatatgtggtcatttccttcactgatttgtttcaatagttgttgccattattattattttttttatactgttgctggatactttcgcagatccaatctctaacctgttgttctaccctaggaggttgaccaatatggcagtagcattgggcttgcttgtctattggcttggtccttgtgttgggaggcatcagcagatcaatggatgagaggagagtgagtcgagggatggctaggttcctttactcacagccccagctcctgtcaagaggtcttgtccctgcagccacttctcagattctactaactataccctccccttagcctttcaggccttgaggaggaaagcctcctcatcccactttgaatgaactatttattgcaagaaccatgactgattcagaatataatctgtccttgaatgaaatagttaatttccccttttgtattctcgtttcatatccctgtccctttatccattcctatattatatcatactatcatatagctaccttatattatactatgacatgagtaccttgtaagtatatcatgctatattatagttcttaagtgtgtgggctttggggccaacttacctatgttagaagttctgccacttattaccatgtgatcctagacaaattgtttaacttctttttcattcattttctttactagtaaaataggggcaatattagtacccacctcacagagtaatatgataattacattgactgatagtttttatttaaaacttttattgttcttactatgaaatgggaaatgttctaaacaccttacaaatattaactctattaattctcataatgaatctgagaggtagagactcagtatctccatttcacagtgctggaaatgatacagacagcatttaagtaacatactgaaaatagtaaaccgaataggtggcagccagtatgcaaattgggaaagcctgactccagagttcattcttttaactagtatgctgtgatagactcttttggcatatggtatgcactcaataaacaactattgttgttgtcgttagcattacttcccattgtattattacacaaaaaataattgtttatgagtatttgtttgctagattataagttccttgaaaaaagaagacaagttttatttgtctatgtgtactagctgagtgcttggcaaatagttgcagtttagtaaatgtttctaaaacaaattattagttgtttcttatgtatttcccaagtctatcctagccttggaaacagctaacacttagctaaacctagaaatgtcatttgagatttcagcagccatcattgttgctgaagccacaggttctcctttttatctccaatttcttcctcagatgattcaccactttctttgtcgtttccctacttcatttttcctatagtgacttttgttctccaataaccattgatagtgatgacagtcccaccttggaaccacttctaactgtcctgttcagcttttcctgaggccagatttcccccaaaatacattttttagcttcataactgctccttccagaaatttgaaacgcattctcaggaattaagcaagaggcatttgattgacgtcatttaatttgtgtttaaatgtgttcttcccatcaacgattaaccagtgcttcagccaagatacataacttttattctccactaaccttagggttgaggtcacaatcaggtacgtaatctgtagagcccagtgaaaaatgaaaacgcagggcccttggttaaaaaaaaattaagaatttcaagatggcaacagtagagcatgaaaccaagtatgaatcccttctaatgcagatccttgtgtaactaactgcacaagttatacgttcaagaagctggtcctggttgaggtctttgtctacctagggcacttctcactcagagaggtggaataatcttaactttctgtcttccgtcatctgaaaacttgccccaaagttccttttgccatctcttgcagcaaacctagtggttgttatctgttaaggattcctggtggcttgctttagtttcctacagttcttgagctgcatgtgttgaatggaactccaccattaccatgtaacacatctgaatactcttattttcctccagttaaattctgcgctccttggaaataatggtcatgcaccctaccttagtgatttctaaatagaggtagtatgtaaaaatacatatttacttgaattgcatcttaagaggccagcccatgggaggcatgaagaaacctatgttactaattaatattcaataattgacagttacacattcaggtagtagtgtcatggaaccatcacgttacatggaactgaagagctgatgagaggtttagggtctaggaggacaaaagtgagtgtattagtcagggcctgaggttatatgtacccagacaggataaaatgggacaatattttattagtggaaatatctatgtgaaagaaaagaaggaggaagccaaggaaggtgcaagagatgttagatcaagatgcaattctgactctgcaaggaagagagagggagagaaggctaggcagaagcatcccagtgtgcggtctagtggaaggaaattttggcaaagctgttgggaagtcattgaggcagagccaggcaaagaagtcccatgtctcccaaggaaggctctctgccttagtattcccaccacacccaatcattgggtgaggagaagtctgtgagaagcttggctttggtgcagtgcaatcatggatttcaaaatgcagtaacaggagtcctcagtcagttaagacccaataatagaaggcctgcatattctcatggtggccacttgggtatgaggagcagtggtgtttaaaactgttttgtataatttaaataaagaaaagctgaggactacttaagcttgattccttcagaagacagtctttggcctttatatttcatgtgatatctttgccatatgctctgataactctccatgtttcccctaccataatacctcaggttgttgcaattgcttttttattgcctgtcatcactactcgtttgttttctctttgagaacaggaattattttctccttcactgctacagcccctgcacctagctcaatgagtgacacaacagaagcacttaaaaaattgctataactcaaatttgggggatattctacaaaatacctggcctctgttggtcaaaactgtaagtgttataaagttcaaagaaaggcaaataactatttcaacttaaaaaagactaaggagatacgacaactaaaagcaatgcgtgagtctggaccagaccaggaaataaaaatatagctataaagttcattaatggggtaattgtcatactctgaatatagagtatggataagattatggtactaaagccacgctaaatttcctgactttgaaactgagctgaggttatttaagagaatgtctttgctattaagaaataaaacctaaagtatttaagggtaaaggggcatgatatctgcaaattattctcaaatgattcagaaaaaaaatatatatatataaaacattacatatacagttatatatctatacacacagagagaatgataaaatgataaataattaaaaataatgtggcaaaatgttaacaaatggtgaatccgggcaagggttacctgggagttctttatcttgcaaatattctgcaagcttgaaattatataaaaataaaatgcatcttataaagtatttattcagtgaataaagaacaaaaaaggctaactgcagttggaagatatttatgaagttggttatgaagattcttaagaagttaccgatggaggtgctagtagaacattcaaaaaagaagtagggaaggttgaccaagtaggaaaatatcaatatccaagccagtataaaatggaaatgagaagtgaggaagtaagtggaagacaatgaggatggttttcgatttggccactctatttggagaggcagccgaatgcaagaatagaagccagaagaagatgctcagtgagatggttgaaagctagatagattacagcatcctcaccagtaaaaccctttcggtaactagaaaggctacaatttagtaccttcctgacttctatgcttattttcttcaatacataaaatggttccgtaaactcttttaccttctgaattctttatattaattttttgaagttgtaaataaaatagcatcagttctacattgttacatttcagcttaattcatattcatttactgaaaatgggaacatttgaaaaatcatcatgggcatttatgctatgtagattgttgatttttatagaaaaatataaaaatatgaccagtttgattttcaaagtcttttcttagacatgtaaatactaagcattcaactcaacatatagagtttttatttgagtattatttaggtggaattctattttaatgaatacaataaaaaattgtaattttgtctaaaagcctaaaatgccctagttataatatgtatgatttcactgtttaacttcctatttcatagggttgctatttataaccacttcactcaactctggggggacttagtgagattaaagacttctgattcactttgtatttgaagaattttttttcctccatctttgctcagctagtggaatccatgatgaattctcatctccaaggggtaagcagtttttagtaaagcccagtagctgacttatgactccttagaaatagcattgattccttccttctcctgtgttttgtttcctctagaatgatagaatccatgtagacacgatccattatcatgcttaggtactggtaagcatgtaatgattttagttttgttcgctttaagttatttgtgtcacaaatatctgggatcatatcagagaaataaataagcacaattagcattctacttgtttgttatgactaaagctaggttgaggaaacagaaaaggaccagaggtcatatgaggatgaagataatactaggaacagcatgtttgggagagtaacatctggtaggggtagcagattgggggcagagaacagaattttatagatggatattttggaggcaagtagtttgagtaatgattagatctaaggtgttttctcatctgtgggtggctcgaaggaatagaggtgaaggtcagtttatttgagaagttctggaattataaaactaagttgaagtcaaagaaagtatagtagcaaataaatagaatacccttaaaaggaaaccaaatgaaaaataatcgttactctcaccatatgcttgtgttcttattagcaagaaattcttttaaccactgtttttataatatcttaatgaaaaaatactgaagcgtatgccatattaaatccctctctttatttctagaaagggaatcaaaggagaaaattcccattctgctatactaaaagaccactaagtaaagagcctattagtgtatgataaatcccatagcaatatacattatcattttacagcttctttgttgaaatgaatgtttgtatgtgttgaccatagagtgggataaaaagttgaaattttgttttgaaatattttagaaatgcatagttgtactgcagttgtgaacctccttagatttttaaggaggctgcttcaaaggatctcattaataatcttctcaggtgcttacaaagcatgtgtctgtcagcagaattagagaatcacccaactagagaacaggtttcacaataccctgagacctattttgttcattagagaggaaaatggcttgttttgagtctaagttgacatgcttgctaatttcagcaataaaagctgttcattgtggtcaggtttaatttagagcctggtaaggttcagattaaagttgatcaacttacttttacaacatacttcttaaatgaactttgaaatcttaaaagaaggaaaaaagtatagcaaacagtgaataatgtatctaaaactgagaagcaaaaaaaatctggttatgtgagagtgaattaaaagaagaacaacccaataaagataatctttgttatataaaaatttccaagtatcgaaaagcacgatttttcatgtgagttacacactataccgaatatatttgtccactgccacatgcatagtccctagaatagtgcctagtgctgaaaaatatttattaaaatgaatggatgagtaaatgaatttatgtattttgccagccctgtgtatttaaagttctctgttaactttgaggtgaaaatttgacttcatctgaggtttctgggtaagtccgttttaaaaattctattgaacatattcaaacattttagggtaggcaattccaaagcaacctttcagcttcccatgtcacagatgaccagagtttcacattctaacactggaaaacatcttatttcataaaatctacctgctactatatggttcctactttaaaatttgttcagtactctccagctgacttatgccacttacttcaatagctgtctttggcaatttgttccatatttcaaacactctgttgtgtaaagaaaccataaaagttagaaacctgaaaattggattttttttctgagcaatcacagcttacaaatgtggaaaatttgttaaaagttagcccctccaatttttcaatacagagaggagaaagtgcctaaagtagatgtacaatgtttggaaaagttttttgcattattttactattaccaaaagcaattgagtttaaatcacaaagcctgtctccctacctcttcacagaagaaacactacagaatgatcaaaatttggcctttccaaaaccaaaattcgttagaaaatcagcaggagtcaaagtacagagtaaataactaagtttcatataagtttcagatacattactatctaccactttcatctcttcatcttcattggcctcatgtggtagaacatcatatttaaaattatacaaacttgctggcttgtttactagtgtggttattataagaaaaaaatgagaaaatatagataaaacatctgtcacatattgcttataaactaacagtaaatattacttgtattttccccaattaaaataaaatttactgagttttagaaccagagctagtcagatgcctttttttcataaatttcttcataaatacctctgagattgtggtccttaaatctagagagactaagatgacagagaaaatagacactgaagaaagggaagaatatcttaatgatttacattactacctataaattaaaaattgttaactttattatatttgtatttttatttaaaatagtgctatattaaagtcatttataatacaggggaataggaatactaacctgtaatctgatgctctccaaacttgcctaaatcataaaagttaattagataatttatttaaaatgcaagatttgcagccctttccactacatattcattagttctggagggaggcaaaaaggtttggtgattcttacggacaggcagcttaggagaaaagctgatttagctcgtctacttcaccttttcatttgacaggtgagaaatctcaggggtacaatgaagttaaataagtaatatctcttaaatcggttctgtgctttttctgtttttaaaataaatataccttaattttgacgtcacacagaatgatattataagtataaatagttatctatcttttaaatacattgtcgtaattcagaataacatttcttactcaaggcattcagacagtggtttaagtaatccgaggtactccggaatgtctccatttgagcctttaaatgaagaaaatctatagtcaagattttcatttgaaatatttttgatatctaagaatgaaacatatttcctgttaaattgttttctataaacccttatacagtaacatcttttttatttctaaaagtgttttggctggtctcacaattgtactttactttgtattatgtaaaaggaatacacaacgctgaagaaccctgatactaagggatatttgttcttacaggcaacaatgcaggatttggaacagaggcgtccccagttggaagaactcattaccgctgcccaaaatttgaaaaacaagaccagcaatcaagaggctagaacaatcattacggatcgaagtaagttttttaacaagcatgggacacacaaagcaagatgcatgacaagtttcaataaaaacttaagttcatatatccccctcacatttataaaaataatgtgaaataattgtaaatgataacaattgtgctgagattttcagtccataatgttaccttttaataaatgaatgtaattccattgaatagaagaaatacatttttaaatcaattcagggcttatatagttgcaaagcatgcattgatgggtgtggtgaccacagtgtggcagaacatttgtggcagaacatttgttctttagttgtcatctgggctggcatccatggagatgccagtctctccctcatatccttggctgttggtccaagcaggcagtggcttcttcctgggccatctttcattcccatgtgcagtgactttcagatctggatatctctccgctactttgatgcccccattttgtaatatcaaaaatcatcgtactgtaccttatgccgtagtagggtgggcaggaactttggtaagacccatctgactagacgctgtgcatattcttttcttctgacatacactcctatccatttaatggggagagtgattcgcagtgattgtgtgttgtgtcagtgagtttccatggggtcaggaagagtgacagacgaaggagtaggggaaactcgccacccggtttccctcagagattctcctcagaaatgaggtccaagtcagctctgctttcaggttctctcagatctctctcggtttcttcacttctctctaccttccttccctccagggacacacactggtattgaattttcttgcttcctctgcaatatcccctcattttccttcccacaacccgaagaatcctttgtagtgcaggaaggaggaaaacctttcagccatctttttttttctctttgaaatcttttgtcttttaccaggcttagacttttcaaactcggaaaccatgagagtctatatcttcataatttatattctgctatgttaacccttccctaaggaaatgactagttgtcaatatgttggggaaagtgaaagagtaaccagagtaaaaggttaatattttaaaatattattagtcatacttccacatattgggtaagtacttattgataatagctagtatttattcagtacctcataagcattagatggtgtgtgcacatgtgtgtgtttctgtgtgtttctgtgtgtgtgtacaaaatctttacagaatcttgtgagctatattttataatccccattttatagacgagaaaacaggttccaagaacagttactcggccgggcgcggtggctcacgcctgtaatcccagcacttggggaggccgaggcgggcggatcacgaggtcaggagatcgagaccatcctggctaacacggtgaaaccccgtctctactaaaaatacaaaaaaaaattagccgggcgtggtggcgggcgcctgtagtcccagctacttgggaggctgaggcaggagaatggcgtgaacccgggaggcggagcttgcagtgagccgagattgcgccactgcactccagcctgggcgacagagcgagactgcgtcgtttacaaacaagcaaagaacagagcttggaatttgtaaatgtctctttctgacttgaaaatctgcgctctttctagtatgtttaccatttcccatcttgttttgttgcttttgttaatgaccttaatcattgtactaagactaaatacttcttttgtctgaaattatgtatgttttgattcacttcctaaagacatgtcttctttcagttgtagtgattgctaattaaaataggctgttcttggttttgaaagtttaactctttattgttgcttaaacaatgaatgtggatgtatgctaatgtattatttcagtaacactagccactataacaggtaatctcccaaatcttggaggcttactacagcagaaatttacttcttattttagtgcagtccaaaataagcagccctctatgaagtcattcaggaacccaagctccttccatcttttgtgtccagagcataagactcatatgcatttaatgggcagatgaagaatgagtattactcatgaaaatttgtcatgagccacgcctggaaatggtgtgtgttaattttgttcatattctgttggatggatcttgtcacatggtcacacctaactgcgagggaattagggaaatagtgtacactgttgagcctaggaagaggaacagatttggtaagatagccatacaattgatttagcagagcattcctccaccatactggaaccttgagggttctccaacaagttgcaacacactgacccaaaagagtgaatcttagtgagtgatttactcaatatgagactgaattcccattacacaggtaagtgatcagtttcttgcctgagaaatatggaaatttggcagtgaggtttatgcaaatctgaacatactatacagagagtcatttgttattttactaatgaaaaatcacttcaattttttccctaagaggaagacaatatgaatgtattatacagtatttgttcaacattgtctgaacattttccattatcccctgcatttttttttcatattgcattgactttttcatgatagagattaaaattgaatgaccggagggcaagtttgtatctctctgccaatattcagtgatttgaatagttcttcttttctaagcttttgtcttttaggaatgaatacctttatgaatatttgcagcctagtggaaaggctgtaatccaaatggtccaagaaagcattttcttaaaagcaagtgtctgtcgagatgtgtcatagcgcttattaagagtctaagctggaatcttagttccaaatatgcctggagcctctaaatggtaccaggataattctgacaagatatgtttatctaaacaatgtcatttgcagccctgctacacttcagtttatctctccctttgaaatctataaaatgggatggaaattcaatactcataaacttttcgatcgtgttcaaaatagaatttttcttagtaaagatttggttttcaggaaaaggacagaaataaaatacttgctcataaaattgtattttctcatttgatgattttggtcttcctttttattgccatgaaacttctagaaatgctcaaaaagaaatcagctaaataaagaaaaaatagttaatatatgtatgtaatactatattgaaacatttttctttctctggtaaatcccatttcataactttgaacagttgggaaaatctatacatagttattgcagtctatcaagagaaaagttcagtacaaagctatttatgtctactagaaatattcatgttaaacttcaagtaattgggtgtgcaagccaccaccatgttttactatatgaaactattaccgtggtatctgttgtattcaggtaattatattgatggaaatcatgcagtaataatctaggtaagagagtaaattttgtctaaatcagatcaaatgaaaaattctccctctttctaatattcgaattgctcatttttctttaactctttggtgtctgaatttgtcaatcattcctggccattttcttctgcaaaagggctgggtcaggggaccaaaagcagataagattagaagaatttaaattttcttccttggaggcgtctgaattacatgaaactcttgttcgtgtctgttaatactgcaaggcataataccataataccttgcatagcagtgaagaggatttggaaagataaaactgcttccttttatcattctgtttatttcacaaacaatattggtgaatgtcgttcctgtaacatttggatttaagagccttgtttctgtagcttctccctccgtaacccccaccactaccatttcggggctatacagcaatagcatgcattactttaaaaggcaggctgcctagactggccacttgttagctttgtggccttgagcaaatgactaatctcagtaaactatctgctcttagtttccttctctgtaaaataggctcacttataactatctcatgggttgggaggattagatgaaataattaatgtagagcccttagatcagggccatagtaaaagctgaatgaatgttagcatttgttattttaattataatctattggggtgctttgaaggcttaatgcaaaatacttaatgagctttttggtagctgtttagttatttcgccccccaccaccaccccaaaaggagagatttaaaagaccgacaggagaaggttgcttggaaaagatggaataagatctataaatagaattaaacaaatattcaggaaagccttttgtgggaaatactgcaaaatttttattatctataaatttaataggtagataaaattactactcccattttagagacagaaaaccgagactcggagagctaacgtaacttgtctagggtcttaggaagatgacaagtgaggaagtagaattcaagcccacgtctatatgattttaaagcccgaggcacatcaaatggaaaaggctggttagtcagaaaaataggaaggtatatttatctgacaacttaaaatattaggactaacctcaggtaattatagtctggatatacatttttgctgctcctgtttatacttttgacttctgtgtatttgagtgtctaatcaaaggattgtcttttacatgtgttggagatgtacagactagtggaccccaatgatctattagctgtgtaaccttagccaagttaattctctttcctaaactgtggttctctcatctgtcatgtggggctaataatagtacttatgctggtagggtgattaagaaagtaaaataattggtgtttctaaagtaaatatgtggcacatattagatgctcattaaatggtacatattgttatggtgagatggatttggtacagagagaactggagatgggagaatatgaagggtgtataatgtggccttttattagctaaaccaagggaaggacttctgaaacagaattccaagttttaagagggagtcgtttattttggaattattttttcagctaaggatttttcaacccagtccagaattcttagagaaatttagtgatagcttataaattttaagaaaaggaattcacattatattgcataaagaactggtatacagggccatagaaggggagaatgttcttctgtatgagaataaaaaaaaacatctctcacacgatttttgaattaactgacagttttatagcagctttgtcaacccatcattcattgctgcaaccaaatctatgaaatccttcatggcgaaataaaaaggctctgttgttctccacatttgtatgaaatctctgttgctaatgaaatgccagccagtatcttcctctcaggtattgtctattagatggttgcttattttagaagaagtggagtcaaccatataaatttccttcttttgacatctagcacctgctgtcaacctgttatagctacaagcagctctcaaaattcacatccactaggatgccgctggcaaccaaagagttcagttcagttcagcgaacgtttgaatgcctactctgtgctatctaatatcagagatggtagaggggatacaggaaaaaagtaagattcagcctttgtctttaaagagctcacaatcaaatgtgggtatttggacaagtatatttaggcaaggcagtttaggataggtgcttcagtagagcagtattacaaaatgttgagagaaaactagaggaggagttttaaatgagggcttagtggaatgcttccaggaggaggctgaatttgacctggtcatgaataagactttgaaaagcagaaggaagctggagagggaagggtatttcaggaattgatgacaggagaatacataattagacctgttaacagtggggtggaagacgaatatcagcatgggagtgtgtgtgtgtgtgtgtgtgtgtgtgtgtgtgtgtgtgtgtgtgttgtggaggataagggagtaaatgaagtcagtaagaccagttagaaggcaagagagcccaagctggagcagtgaccatggagtaaaaagaaagaagtgaaattgagacataaggtggagctagaattaacaggattttgacattgattgcatatataaaactgtcaatctaagagaaggcctgcctctaagagttggagattgaattctttggaagattaatgtcataaccagagacaaactcaggataaggagttgattatgggagacaaagtaatgtgcttaacatgaagctagatgaccatactgagattttaaagaaatggttgaaaacatagagattgcaggagtgatgttacttttggacaagaattcaaaagttacctggaatgtctgagcttgcacagagagagggtacctggtgcaaagaaaagtgaacctaggaaaaagcctagaagttggtttacatttaaggaatttgagaagaggtagcaccacccaccccccacacaacccccaaccctgccaacttacaatatagaagcatttagacacacactgaataataattttttttttgagacagagtcctgctccattgcccaggctggagtgcagtggtgccatctttgctcactgcaactccgcctcccagattcaagctattctcttgcctcagcctaccgagtagctggcattacaggctcccaccatcatgcccagctaatttttttgtatttttagtagggacggggtttcgtcatgttggccaggctggtctcaaactcttgacttcaggtgatccacccgcctcggcctcccaaagtgctgggattacagacctgagccaccgcgcccagcctaaataatgaatttatagatgctacactgtatggtttcctttttctgctgctgtacaaccattcaagtaacataagtttcatcctggttcttaatgataccatgaataaagtatagaaactctttagctgaggattaaagattgttgtgtttaggtagaccaggtttctgatgcagccctcagtataccagggaaattagccattactgtttgccttgtaggtctaatgaaccctttagctttttattttgtatatgtctaagttactctacaaattcttatggaagtataaagagatagtgaaagacaatcttatgagaaattttaataagaattgaaatacaggctgggcacagtggctcactcctgtaattccagcactttgggaggctgaagcgatggatcacctgaggtcaggagttcgaaaccagcctggctaacatggtgaagccccatctctactaaaaatacaaaaaaattagccaggcatggtggcgggcacctgtaatcccagctactcgggaggctgaggcaggagaattgcttgaacccgggaggcggaggttgcactgagccgagatcacgccattgcactctaacctgggcaacaagagtgaaactccatcgtaaataaataaataaataaataataaaaaagaaatacaacttactttttgtatcaaataaattttggtgcacaaacatcataaatgacataatatctgtcacacatcctttagcaaaacaggattgttaaaattcttacagctaatattatgtggtgaagttcttcctgttgaataattaagtggattaaaatatcatatttcctttctgtcattagaaatatattgtgcattaatcagtccttgggcctgagaacatttatctaggttttcatcatctgaaaactcacagtccaatatttcacctgtattatcaattcaccattatcattagagtttagaatgctgctgtctctttccatctatcttctgttgtatctaataattaggagatatatatatatatatatatatatatagagagagagagagagagagagagagagagagagtgagagagagagagagattggtaataatactaatatatataataatattatatatatacacacatacagagagagagagagagagagagagagagattgattttaagccattaactcatatgattgtgggagctgaaaagtcaaaaatctgtaaaatccaaaagcctggcaggatggagaccaagggaagagttgatgttgcaatcttgagtccaaaggtaatccgatagcagaattccttccttttctggggacttcagtcttttctcttaaggacttcaaaattgattggagaaggcccacccacattgtggagggtaatctgctttactcaaagtctgctgattgaaatgttaatcacatctaaaaaataccttcacagcaacatctagattggtgtttgaccaaacaactgggaaccatagcccagccaagttaacacataaaatttaccatcatcagccatcatcatgaggttcataatgtcatgtgtttcttcacatataaatctcgtggttcttttatttttttagtagtacctagttaataaggtacctggaaatatacgttaaataatagaaatggtctttaatatcttaatgaatttcagagttctatcagagtaattgtaacttgtatataaaaactgatatataaaaaacaagtatgttttttcttcctatacgttgtgttaaattaatactaattacctatcatgaaatgaatgttttccatttttcataaatgtatttcatttttaaattaagaggattaatatcaaaacatatttgaataggatttaaaatccaaattacctgttgcgattatatttaattataaatctttcaagtgagtttataataggaaaaatattttttattaaagtgatgtaccataattatgaacataaatagtgttttctactaattgtttttgtcttcattatgtttctttttaaggggaaagatctgggttaacaaatgttttattcatccaccttgaaaattaaacataataaacaaaactattaaataaataaaccaattaaagaaaatagtttttcttccttttttgtgataaagatgattatgagtaaatatattaaagaattttatactcagacaaagtgagctaataagacaaatacaaacagagatgagcccagaaagagatactctacatgtttataggctagcatttttatcttatgacctacagggtcattgtaactaaagtcttgaatttctgttatattttggtacctgtgggcataaataggaatattactccctgatggcatcatgcattttagataaaactaagccaagggttaaacacgtgccatggactgttcctaaaaaatgctctcagctctcaagttatagaaaattgtagggattattattttgtacctactacttctttctttaccaaaatttacttatacatgatttgaaaattgcttgccacctgtctttattctgttgtacttgtcttaagtaaaacatttataaagtaagtaggaaggattaatagattgtgacctttctacatgaaaaggggaaagccgagcttgttctacttttgtcaggaaagagtttgaatagttacctgttactgtaaaacaatcaccccaaacttagtgtcctaaagtagcaataatcatttattatcactcataggttctgtaggtcaggattcatgcattgcttggttgaggggttctgtctcacgatcactcatgatgttgcactcagatgtcaattaggctgcagtcatatgatggcttgactggggctgaaggattcactttcacagtgagttacttgtatagcttgtgagttggtgctgtctagttggtttccctctaaacgagttcctccatgggactacttgagtgttcttatgatgtggtggctggcttaccccaggacaagcaacctatgagttttgccctgagttttctgaaacatgatcccatgttgctttgaatatccccattagacactcccacaaatgtcaatcatactctttgccctaaaagttgcagactacttgtacatgtcctttatcctacatgtgtacaggaaacacgtgcagaataacatgtgtttttgtttcttgaaagaaacaagaacccaccaaaactttatagctccgggacatgatgataattatctcaggtccactcagcctggctccacatggaaaatatgggtattgtaaagaaagcttttgaattttggaggcctaacaaaaagacctaggaagctaatagttggttatgagataattataacaatggtgatgaaagcaattgcgattattacttttatgttagtgagataaatacataagaatgtccttctttaatttcattccttaatttccttaatccccattcttgatttctggattagaggaaagctatactatctacctgattacacaaaaagactggactgaggggtaaccattaggactcttgttagttgaaggtaataaactatattacttcagtggctaaaacaaacaggagcttttttctcatataaaactagaagtcaggaaacaaatggttgctgatgttggtttatccgtttgacaggttctacctttatcctggagattctttggcctttatttctttagtaatatagtagtaacagcactgaatctaaaataagagcacttggtccaagcactggctctgcccccttagtgacagtgggacccatggcaaattatttaatctctccaacagttaattttctcatctgtaaaactgggatcctgataacttccatactagtttggtgttaggattcaatgaaatgacgcatggaaaagtccttttcaaatggctactcactatacaaatattaatgtcttagtaagctcaggctgctataaaataatgccatagactgggtggcttaaacaacaggcagttgtttttcacggttctggaggttgagaagtacaagatcatggtgctgacagatgtggttcctggtgagaaccttcttcttgctgtatcctcgtatgttggggagagaggtggtgcagagaggtactctagtctctcttcttgctcttcttaaaaggacactaatccaattatggaggcctcaacctatgacctcatctaacccttattatttctcaaaggccccacctccaaatatccattgggggttagcacttcaacatacaaattttagccggcgggggggatgccagcattcagtccataacaatcaactatcctcattattgagagttccactaggccttctcaagggttgacaatgatagtgccctgctagctataagagtaaaaaaattttcacatctagaaaatgggtgcacgaatattggtaactgttctaatgtctatgcacagaatttttagaacttgctcgagaaatttgtctttcctgacagtgttgcttctcttaaattccagtcgagggccttgaaaaaaataggttttccatcaagattctctgaatgaataaatgaaatgctctgatattttctttcaatattaagataaagcaaaatgtatacagaattttctattttcagtgtttccaattactgcatggtttggcttattaccatctctaagtctaaccctgggtcataggagtaaagccattgggggtcccctacaaaggatacaaggcagtggtagatacaataagcctgacaattggagtcagatttttctctttcatacaggaaccatggaactgttgccctgggccacagctggctctcagaaaaacgtagaactggtcgaggaaaggaaaggcagggagtccttgattcacttgttatcagaaaattgtctgttcaaacaacagaatgtttgaaaagataaaatcaagtctcaaatgcacagaataagaatgaggggaaaacacctttctctgtaattaaacagaaaagtgtgccatgaagtgataaaacccagtcaacctgaaaatgtgaacatcaagtgtaattgtgcagaacgataaggtaatatgaacagcacaggaatatataggctcacgttggcattttaaagcaatggcactttacctgttcctcatgaaggatttggtttagtctaatcccttgtaggagccactaagaggagaaggcacagtccttttgggatgtaaaatggggaattctttctatgattacaagaatttgtaaattgctcagagttttaggacagcaggttatgtgtctctcaatgttgggtaccatgccaaacgtactttaagagacatagcaataaatagaatgggattcatttttttcttaatgtctggcagggcaaccaaaatgcccacgtttcccttcagtagcttggtattttggtaactaaaaacatgttccagggaactccagaatatgaaacatttcagacaatttgaaactgtcaaaattttcacttctttatgggacaaataaaatctaactttattcagattttaaagtatctcataaaagagtaatactttagatttgtgctgtgctttatacgaattggatgaggaactcttatacatatataagtggattttattttcacaacagtccctatggtagatattgtccttattaagtaaatgagagaaccaactatcaaagatattaatattttgcataagatcacacagatagcggaaccaggatttaatccaactcctctgattctaaaaataggtgttagatgggtattctttccccaaacctatgctgaaaggaggctacatttggagtcagttattgaaagtttaaatatatgtgtatatatatatatatatgtgtgtgtgtgtgtgtgtgtgtgtgtgtgtattcttatatactcatgcatgtagatagttataaagtacatgcttatatgtcaattttatatatacgactgatatataaactatcaatttgtgatagtttatttcaattaagttcaaacatattgggtatttattgactcatgggacttaaaatttctcagaggcattaatttctatgcctttaagcaaaataatgtttagcccgttttagaaagataaaaggctaacatatgttttgtttttgtttgttttgttttgttttgttttgttttgttgagatggagttttgctcttgttgcccaggctggagtgcaatggtgcgatcttggctcacagcaacctccgcctcctgggttcaagcgattctcctgcctcagccatctgagtagctgggattacagacacgtgccaccatgcccggctaattttgtatttttagtagagacagagtttctccatgttggtcaggctggtctcgagctcccaacctcaggtgatccacccgcctcggcctcccaaagtgctgggattacaggcgtgagccacggctcctggccgctaacacatgtttttaaaaaataaacaccattcgagtaggaaaagtgggagaactggtggttcagctagagatacggagatgggagggcaagttgctttctcatgttgccacatctgtaagttacaaatgccatagattaggaatttcaacgttgttgtgtctctctgaggacattctccatgtagtatatgtttcgcctccctgatggacagtaagcatcaaacggttactcctttatatttgaattattttaattctaacatcttgttctgaaaataacgggaatgccataaatacttactgattgattggactgtctcgcaggggagctggcagctagtgtaggctacaagctgccatcatcatctccatgaccatgagtcatcactggaattaccctaaagaggttaataaaacgccttgtttgaaaagcaaacaaaaagccagaagaaacccaaagcaaacagacccagactttgcaatgggtagtgaattttcagtcttaagggattgagagtccttttagtacaatctctcataaacatataacagattttaaaagcaccttggtctgattccagttcacatacctcatccttgcagaatacaacatactaggccatttgaaatgttcctcagtttacttttggaggatctgctgatttgagcaaaatggaaatgaaatgtatatagaaagctcttaatttttttttttttttttttttgagacggagtttcgctctgtcgcccaggctggagtgcagtggcgggatctcggctcactgcaagctccgcctcccgggttcacgccattctcctgcctcagcctcccgtgtagctgggactacaggcgcgcgccaccatgcccggctaatttttgtatttttagtagagacggggtttcaccgtgttagccaggatggtctcgatctcctgacctcgtgatccgcccgtctcggcctcccaaagtgctgggattacaggcgtgagccaccgcgcccggccagctcttaatcttaagaagttcagtttcgcagctccccccccaccaacccccaatcttgaaagcaggaatttggattagggttttttaataaaactttctttttcttattaccatgatgttttttgagagggtacagagaactcattaaaatgttatgttataacttaagacaaaatgggaatgagaatttgcattatataaacaaagtgtatgactaagtaacctgttacatataaagtgtttgactaagtaacctgttgtccctaggagaagtagaataaatatcaacatgtggcaactaacagaatgtgttgtgatcactaaagcagcacattcattgactttacacttcattaagtaggtaacgaattttacaaattttaggacttaaccaggctgtccataatactttgcatcagtaagtaccaaaatctacgatagggcacttcggagttccttaatttaataatattgataatattttgtttacattttgatttaattgtatcatttcattatttttgtgtcctgattctaaatatatacgtcaacaagctatatggccattcaaaacaggtaaactttaaatatgtttttgacatagaaattatgtaacagtcttcatcatgagtataggagtcagatttccaattgaaaatttcatcctctaaaatacttggcatatgtatacagttgtctagttcagacaaaaaagtattgaatataaagttgattttgtaaaaccagaattggcatccttaaggaatacaaataaagggaatcttaagataatataataatgctgatttgaaatgaaaattaataaaattgttattctattttagtatgctaaattggacagatccttatttcattgaaaaattagattcttcagtatatcagtgcactgtgctaataacacaagaagattaaattatgtccatatgtgatttggtagaatttaattataaatataataaatccttcaatatgtacagcagtgaatattccaaatttatctctcatataagttgtgagcaacttaaggataggcaccatcccttaacatacctagattaagaacagtacctagaaaacagtcatcaaatgcttcctaaataaattttcaccttcaagcttatggcagcaaattaaacatagattgacccttttctaatagagacagaatagatgagactgatgacttttttttataaatgtgtaagtctgcaaatatttagtaaggatctaatttacacaaagaaatcaacctagagtgagattattttattcatttcccggaggctgtgactgaattatatttgcaacttgccctaatttttatacttaataatttgcattagtatttaaattatgtgaaggaaaaatataagtttaaaatactgaaaagtatattcacacattcatcaaatgttgattatgtgcttacagtgtgcaaggtattggggctaggaattatgtggtgttccaaggaaaccatgatacagcctctttcattacagtgtttattattaggtagaaaaagtaaaattagtataatattagataggatatatgtgtcataggagtaatataaacaatattttatgaacaatgtatgaaggtataattttgttcatttatccatttatcgctctgtacatccatccgtttattcattgttcattacttcatttaataatactttagtgaccattggaaaagggatttataaaagtgagtaaaatgttaatcattttctaaagaagttgataatctagggaaagacaaatgtgtaccaacaataacttggatataaagcataaattagaggtacaagcaaagaaaaatgaaagtacaaaggagaaaaatatttggctgcatgagagcagggactgtgtcttgtttcatcatagattttccagaacctagatcagtgtttggcacaaagtaggttcagatgagtttgtgttgactgactgtctactgaagtaattgtggaacatatcatagaagaagtagatcagaggctggatcttaaaactgggagaaatacatttcagctccgtgaaaccccagaagtgatatttgacattagaaagcacaaagtcacactctaacagtgacagtactgagtgaagtaagaattttctgcaccccttcttcttcttccactcccattaacccttgttagggtgagaaatagcagctggtgaatggtagagaagactagcaagacagaaagaggaagcccaccatgcccactaccccaggtagtaaaggacctgtccacttccatcctcttctaattgaggaagaaatcatatatgtgagttcagattgaagtattgattaatatattgagctggatattctaattttaatgtctcgatatggagcaggactttgtttccttaatgatgaccagaaaagacatgaaacttacccatattttcacccaagaacagaacagaacaacctacttgaacagatttaaagggagaaccaaaggcagataaagttgtctttattcttacacagcataagtcctgattattcatcaatttatacattttatgaatttaagaaaaaaggaaaggaagactataaagggattcatatcaggatacacatgaaggtaatgtagtcagttttttagtggaaccaaaatattacagtcatcactgaacgaaaatattacaatcattacatcattcactagattaagtgaataaattaaaaatatattaaataaaattaacaaagacatgagcttttcaaagtgtgtggtaacctggagcaataagcagtgtagttggaatgttacctcttaaggattatcaaagaggctggctgttcagtaggacagtggtatggtaaagcaagcttgctacattgcagaactccagagggcaacattctaattatctttagctatggggtctgttcccataggataactataacttagtaggttgacagagcctcccaagaaaccacagcagtgctcaattgtggcgaattacttctctatcccatcaaaatgtcgtgattggacccacaactgtgcatacatttttttggcattttcctgccagaagcatatttacatttctttaatatccagtcatatccttcccttatttaaaaataattattcagagaattccagttttttgtaatcctctcttctatgaattttagcaacacttatatacagatacttgatattctggagaaatatgcttcaagaccatgtggattaacagattttcaaatgccgttatagtatatgtatatactatatatgtataagtatgtgtagtccccaaaatgcgtactttaaaatcctcataatagatctcttacagatgaggaaaagaagatgtagaaaggttacataaagtagctaacaagtattccaaataatattgaacttcagtctgactattccaaaattgcattcttaactctgatttctatatttgttttccattctaaactgtgtattgtgatataagttcctcactaaggctctttttcagggtcttcctaatactaaagtcactcttacaatgagtattttctttacgtgtgaaatccaataggcaaaaaaaaaaacttggcaataaattttaggcattaacctcatgccaagtaattatcagaaggctgtaatgctttgaaacttcacaagtctgattttaagataatggaatgaggcttgcattgtgaactttcttgatgctttacattgcaatatgctgtatagattgacttcctaaaaataaaaaataaaaaaaaagatttgtagagcatactgggaaggtcttgccaattaaaaaccggagattggctgaaggcttgcagcaattgaattttgaatacagatggtgtcaaatcgagtgtttccatagcaacagactcttccttaataacttttagatgggagggggtacataaaagagaaaaccatcttttagcagatgtatgttttcagcatgttttcagattgattttggaagctaatttgtacttaactagtgattgttttaagtggatctaaatattactaaattctcctgaggaaacattttgagaataacagaaataaactctaggaactttataaagacatgaaaagggcacaattttacaaaacctttttttttttggtctggagccaatcaaacagtattttatattgagtatgacctatcaatagtcaaagagttcttgattcttaatgcctgttaatattgaatgtttagaatatgggtaaaatcaaggaaaaagtgctatgtatctcatggatttggaatatcttaatatactctttcttcaggttaatgattatttttaaaaaatgatgatataaatcatttcaggaaggactgcataaagaggtcattgatagagttcatatcatatagcagagttgtcgtagatttaatgtccaatcctcagttttgcatagccaacaactaaattttagtagtttacctagagatgatcaggctctgggagactgattcatgctacacaaactcacaaggcactggtttataaaccatttgaaagaagaaataataattcaaactattattttacaacaagactggcaggaaaatcaataatggtaatgtgttcggggtgtcctccccagtgaggactatccagaagaccaaatgatagattattgttcaaagtgatagaattgggagaagggtaataaagcattatgaaaggatgcttccttaagtgagaaaagctacataaactacccatctttactattctagatgaccttaaaaatattaatagaaacagagaaacagacaattcatctcagatggtacaaaaaacataatagcacatgtttgctccctggcttccttttagattccctgcaagaggttttcccccaaccaccaccatatacagatatacagctttaccttcactctcctattatctgtcacagaacaatataaaactcagatatgttagtataagttaatagttggtagctttatgttaatgacattgctacctgttacccccagattcatctgggttacttcatccccaaaaccctttcaaaacgacatttcccacaaagatttctagtattactggccattcccggacatcttgcttccaacataagaaattctgacataatagggatataagaaggccttgggaatctgtatttataacaagctccccaggctatctgaggctcagccagtttatttttgcagatagctattactatccacaatctcttttatcctattgtaattgcagaagaaaatctttctttctagtttctttgaaatttctggaatgttaggacttagagcctctaggaacttgtacataaaaagagagacttaaagagatatcaaagtagagatagagatagatacagataagtgcatagacatagaagtagacatatataatagaaacatatatgtatacatagaaatagaaatatgccatttagaactcttaagaaatatgtgcactcttaaaatatagtttaaaaatgtaaagaacttgctattaattgaaaatagcataataaacttaaatgaaataaggaccccaaacgcaaatatttctctctgacacaccacacacacacacacacacacacacacacacagacagagagagagagagagagagagagagctgtacaataacaaccaattcctgacccagataaagaaaaaatttttatttatcttctttctcattctattattattttttctagattaaattaaaatggtaattatgtgtaagaacaagcattattgccatataaacaatgcaacaaaggaatcaattgaaaattaagtgaaaataaaaggtacagcttcgttaaagacccagttcttagagcttagtctcaaactctttgtactctgcactcttttcttgatttgactcgattgattgattgattgattgattgagtcagagtctcactctgtcacccaggctagagtgtagtggctcaatctcggctcactgcaacctccacctcctgtttcgagtgattctcctgcctcagcctcctgagtagctgagactacagacatgtaccaccatgcccagctaatttttgtatttttagtagagatgggacttcaccatgttggtcaggctggtcctgaactcctgaattcaagtgatctgtctgccttgttcccccaaagagctgggattacaggtgtgagccaccacgcccagccgattttactctctttagaactgcaaaagtaggaatctagctcatatgcagacattctagaaagtttgatttcaaaagtcttctcaaaagaaagagagcaagagcaagaaagaaagcagagagagaaagcagaagataaaatggcattgtttgaacagggatggaaactgagtaagaaatttggtcactaaacactttagtgtctatcatttaagattgtaatttggttatttatcactggaaagtgattaataatctaaaatgcattttataatactaatactattaaaacattaatttttggagaaagtttattatagattgatttatacttaccactgaatattaaaatgtttaatggaagtagtttcaaatagtatttaatgatatagggaattattacaacattaatgctcaggaaaaaaagtaggatatggaattatttatgccataggatcctaattttgtaaaaaacagagaaaaccagcaaaagaaattataactggaaggaaatacatcaaagtggtttgcagttatcactcatgaaattgaggtgaacttgatttttttccttttatatccatccgtgttttaataccacagacatgctttagatctgcccgtatattgtggctttcagagggtaataaaccattgtgactcagaaatagctaagaatttttatctctcaagaacaaattttcactcccttggggtgtcattatctgttgagaatgcatgcaatagttcaagagccaaaagactctgattcagtaagtttagggtagaaaaaaattaagtacatttttaaaatagagctctggtgtttcaaaggcaatgtgcaaatatacctacttaatattattctaattttttcaggatagctgaaatataaacatctatttttagtaataacacaaatgatggaatgcttttacatatttataaatcattaaggatttgctttttgtttctactgtctggaacatataaatttgaacacaatttagaacaacattcaggaaatatgatttatttattaccttcttgacctttattttatttttaccatctacttttatgtaagtcttttttttcaatcattgtttatttctttacttttccttccacatagaattaaagggagattcgggcttagtgtccttaattcatagttccattgtggctattaaaaggtgaactgaaagcttgcaaacacgtggtaccttgtagataattttctccagtcagacagttagataaaggcctctgaggtttctggggtcattgttgaagctatgttttaaaatcctatatccttctctcattgttggttccttttcacaacacagaagttttcttttttttaatttcaacttttagatacagaaggtgcatgtgcagatttgtcacgtgggagtattgcatgatgctgaggtttggagtacggatcccatcgccatgttagtgagcatagtaactgataggtcgtttttttaacccactcccctccctcctccctctagtagtccccagggtctattgttcccgtatttatgtccatgtgtgctcagtgcttagctcccacttataagtaagtgagaacatgtgatatttggtagaacttttcatttttaagttaaaaaacaaaacaaaatgaggatgagtggaagaactattcagcacagcaggttataaaccaattaggatgatgacgccctgaatggagattttcatgaacatctcatattagctatttcagctttggtttttttaatgttcaaagtaaatagaataatgaagaggctatttaggaaggtttagactgagggaaaaaaatcctttcattaggttccaaataacggttagcttattaaacagcaagaggcagagatttagcagagaaaaaataaaaagatttaaaaaaaaacaacgagattaaaaggtcagtaataccattggaactggcagcatggcaagtttatatcagctatcttttgttttggaacacaactatgctaattctgttctgaacctcttgctaatgcctgtctcaagaaaatttaacatactttatctgtgtgtacaaaaatacctaaggacaaagctattacccaaactgtattcagattgaaagaatccatatagaaatttgcagctaacgtattagtcagtgtatgtaatttctactgcttcacagcacaactctttctaattttcaggagcaatatagcaactgcttgccagccaagagaaaaccataggagcattcttatcattggagccaacattagttctgcctacagtgactaacatagatgcgtttattgctagctggaattttccattggcactagttacatgtaataagttagtgctttcaaatggaccgtggaatataggaaaactagagtctgacgtaaccaaaaaaaaatgttgataaactcagagattatgaaagagaggagaggagtggtttttgtggaaatgatagaaaagcaaaaaaagatggcaggatttggaaaaaagaaaatcaggttagagatttaattagtaaaggagctccttttaataattatataagagtatgagtttagagtaactgcctggctaatatgtacaatcttcaagttcagtcgttttccaaaattctaacttttagcattttttttttgtaaattttaagtggaaatcttccacttttgttgactaacttggctacctgatattttactcaacctcctactttcttgttctctacttcttctgagtctttgcttccacaatgaggtagctcatattccttaagtttcctgtctggttttgcttttttttttttttttaacagctaaaataaactctacaagcatttctatcattttctttacatccaatctcttgtcagccatgtcctaatcactttggtaaagtatcagtgaccacccaagaggttcactttgcttcgtcaaaggaccacctgtcatgctttatctccagagcttctgccttgaaagtaagaataatataacctttcctgaatgtcttatttcaatttcatgcatttgatctgcctcttcagaccattcccaaggctttgcccttgttctttaccctcatggcttcagttattcatcactatatgaatgacagctctcaaactgacagctctggcctctcacctatttcatctattccatatggcaaactgtctatattacatttcatcatgagggataattataattccacattcaacaagaaattgtgggtccgtgttgatttccaacagcaacctttattttttagactatgatagagaaagggtcaactttctctcttacttatttatctcaaataactcaaagtcaagctagaaaagccaagcaagtaatatttcccaacaaagcagctttaagcaaaatgattttcagacacgacatgcagcctgtattgtggaagaagcacagtgacctaggtgtactttgctgaaaagcagtggtcacagtccattagtttcatctttttcctgcaagagagaaaagtatggcagggccaagactcctaagaccccttaaaaaattgtgaggtttttataaccctgttcatttcccatcaaaagcattcatgaagcacctgccatgtaccagatgatgcattctaggcagagggaagaacttgggcaaagtcctgtacattttatcttctaaatcttactaatcttttcttatctttccatctaccacccaccatcaggctgtgcctggactcctatgctaacatcttactctgtttttctgcatcttttttgccctcccctccaatctactctccaattagcaacatgactaatgttttcaagcccagattagacggtgtcacttccctgctttaaacctttcagtggattcccattgcactgaggttgaagaccaaaatctttaccataactcacaaggccactgggagctatgaaaattttcttttttagtttttccttttaattagtgatgcattcaataagtggagtctatcgtgaaagcatagattccaaaggcatgtgaatactcaattatgtaatttacttacagaatgtttattacttcttttttagctttgattttgtatacatcctaactcaatctcagttatataagagattataaaaaagtttgtgatgaatgcatacataaaggaacaaataattaacaaatatataaagacaaatcagtattgaatgaccaaatggctctttatttattaaagaacttagaaaaatatagtcttgcttgagaccaagttctggcaacgtatgtgtgtctttttgtttgggttaaaaagcattagttttatatgttttaaaaggataggatcttcccttggctgcaaatagtataggcaaaatgctattctgtatcttattttaaagaaaataacaatcataccttattatttgctgacagttttgcagtttacaaagcactgttcacatggattaccttattttaaattcctcaattttttttccttttactatgggaattctgtttcaggagaatttccctttaaaattaaggtgattatactattctgttcctgtatttcgtagccatatgtttcaccaaggtattgtctctctccaggtctttcttctctggatgtatagttatgattttccaggaggtaaatgaaaacagtgggagcaattgacagagtgttttttgtttcccataaacccaagcattgcatttaaggagctgctgtactattgtaagagttcctatactaattttaaaagttcatttacatattttgtagatttttaggataagtcatcagaaaaaaattaaaaataaatttacatattttgtattaagctgttttgttacttgaatggggattattggaacgaggaaagaattacttttatctccccatttttcaaatcatttactataacattcatgaattgctgaagtttaaacaatcaaaaatatctgaaaatggagcctaggaagggtaacttatgtctttcatactccttcctttttggtttttctaccagcattttagtctaaaatatattttattttcactgatcctgtgtttgtcttaataatatagtatgtatgttaaatgaaccagaattcattgatctttttttttattattcctctttttgcttttctggagaagcatttgaagaaatcagttcaggctacacttcatcaattcatttcctcatcttccccttaatacaaaagccccattttcactcttcaaaacatttgatcacatacttaattttcatagcattgactaaatgtatgtgtttattttgtttatatattgcatatttgtgatgattttcacttttacagtttaggcatgggtaggaaggacacttacatgagtacttaagttcttggttatgacttgagaaactcacaaggtagcatggaatggcacgtaaacaaggctttgatagggtgaaagggaattatcaggacaaaactgactagtggcagtgacttttgagcagagtgctgcaaactgaaaaggcagagagcattgtaggcagagagaaagcatagacacatgtgagatacatgtgaaatacttagacaaatgtgaggtgtgtggtaacattgtacatacctagggctccttcctgtgtagctgtaaagctggagtataggcatcacaacaggcagcagaagccaagaaactagaaaagtagacaaaggccacgttataaaagatcttgtaggataggtaaagagttttaatactatcctgaaagcagtgtggggtgggaggcatgacattaaggaaatttaataagtgatgaaagaccaagattttcatcttcagaagacttctctggaggtgggtggaccacttgatgtcaggagttcaagaccagcctggtcaacttgatgaaaccccatctctactaaaaatacaaaaaaatagctgggcatggtggtgcatgcctgtaatcccagctactcaggaggctgaggcaggagaatagcttgaacccaagaggcagaggtggcagtgagccaagatggtgccactgcacttcagcctggatgacagagggagactccctattaaaaaaaaaaaaaaaaaagacttctctgactagagttttaaagaaggatggggagtgcaaaaggctaacattaaatcagtggttctcatccctggctgcacgttagaatcactagggggagtttaaaaaaaatgccaatacttggactccaccccaaaccagttaaatcagagccttaatagggcccagacattcgtagtttttaaagcagccctcttgattcaaatgcacagacaaggttgtgttccgctgaactagagagaccatcaggaggcttttaactaaagcaatctagggaagagagagatgaatgatatagaggccagaagagctattaaggagaagtgactcggcatcttcttggttaaagtataaggaagaaagaagaatgaaggataatttgcatgtttctccttcagtgactaagtagaggaacagatgtgtatcagtgattaggggagaggaagaatgaagatgatgtaatccagtttggatatgttggctatttcatagagatttagtaggcgtttggctctatggatacagagttcaagagacaattcttagcttaaaacacagattttactctgattattttagagatagtaaatgaagcaatatacatacatgaactcaccagagagaatatgtaaagtgaaaacaaaaagatcaaagggagacccctagggaatagcaacatttaaggaatgggcctaagagagtgaggagtggccaaataggcagaataaaatccaagaaggaatcttccatattaatcaaaagagaaggtttcaaagagggttcgtcaattggcaggtactgaagggatatctgaaaacataaagactttagactctctaatactgtagcaactttaaggtcactgctatcacctacaaaagtaatttcagtggcaaaagccaaaacgtaatggtttagaagggtatgtgaggtgtggatgtggaaatagtgggtatagactattgcttctcaaaatgtaatcacctgaaaaatcttattttaaaatgcagattttgattcattagctctagagtggagcctgagattctgcatttctaacaagttatcaggtgatgctgatgctgctcatacacaaaccatcctttaagtagcactggtgtaagccactctcccacaaaggaggaagacatagggtttccatcaggggacgcaggtggggtgtaggaccaaaggaaataatactcttttgtcttttgtttggttggttttggttgttttcttcttaaaataaacatggttgtagacggagattgaagacataggaggggtaaaagatggaatcacttctcatagaagatggaagagactggaacattgagtacagcgagggaattaggcatgggtaggagggacacctaaatctgaagagaaggaggtaaggaagaattgaaatacagaaaagttctgtcagtaagcaatgtatggaattgtgctttttagccatagtttctgttcaagaaattgttttccatttatttttatttcttaacttgaatagttggatggtggagtatgcttgtaaaaataagagtgaggccactttgtttttcggggttaatttccgttttctgcactcatcaagtaaaagttgaagtggcaaggtgtagatatgaaattcagtgtgtgctaagggagaaaaaaatgctttttattctacatgattttaaaaatatttatattccaacaaatgcatcaaatttgatgtgcaaatttacagtgatgaatgagttttattgtgtgcattgcatgctggtgacatggtaataaatctgtggtgctagaattataatggtcccctttagcttcgctttaatgaactcttgctgaacacttttgagttgttagtactttatttgctacatttggcacttaattagttaatgactgagatgctggaccgatggatcatctaatgatatgttaggcctattatcacatctagatagtttcttttctgtgacttgtaagtgacctaagatgataaactgaaatatttttgcatagatatacatcaagcttttctcctaacttcaggctttcatcttaagcaatagtttccaacacccccaaaagagaagtcattatgtttttaaaaaaattattcattttaatgtgatcaaataatatcacatttcagcattcacctatttaattaataaaacaacttacatgtttcattatgactggatgttgatattttttcataatctattatcctccaaccagtggtaaaaacccaatcctcctctcacccagctcatctttccgtatgggaagcaatacatacttccctatgttttattaccaaaacaggagaatgagctttctttagaaggttaactcattttctctattagaatattcagcatacttttaaggaggtaatctggtctttgacagtctgttgattagaaaattaagagacctgcctaaattccatttccaactcctctccatacacattgtgactttgagcaaaacgttttgccatttccactcgtataagttctgtttagtatctttaaacttccatatcccacagatggtatttttttcttcattggaaagtggtgttagtgattcagaaaactgcttaaataatacactgctttgtgttttctgtgagagaatttttttttttttttgagacagagtctcactatgttgcctaggctggagtgcagtggcgcaatctcggctcactgcaacctctgccgcccgggttcaagcgattctcctgcctcagcctcccgagtagctgggattacaggtgcctgccactgcgcctggctaatttttgtatttttagtacagacagggtttcaccatcttggccaggttgatcttaagctcctgatctcatgatccgttcacctcggcctcccaaagtgctgggattacaggtgtgagccaccgtgcccagccgagagaacattttatctaacattctattttaaaatttttcaaatacacagaaagctgaaagaattgtacagtgagtgctcatgaacccactctctagattttgttgtatcactttacttctttctctacccgccaacccctattattttctgatgcccttcaaagtaagttggtgacatcggttccctttacccctaagttcttcaacatgcatgtcattaaccagagctcaatatttgttcacatttcttttgtttgtttgtttgtggcaaaatttgtatagactagaatgtgtaaatctcatgtgtattatgaaatgagttttgatgaatgggtatacctgtgtgacacatgcctctcttaagatacaaaaaaatagccttggcccagacaggagggaacattttttaggttggcttgagtttcctttaactgacatgtagcatgactgaatatatgaccataagattgccaagttgaaatttaccaaaggtccatccaggggaacagtatggctattgatacgtcatttgttcatctaggcactgggctgggtgagttcttcacaaaaaccttgtaaggtgagctttcagctctgacagaggcatcaagaaacgtatttcacaaactgttagagctgaaaacatctccagggatcatccaatctatcctcctttgctttatgactcaggatttaagaagccccagaaaagtccaacagtgttaccaaagtacacgattgcctatttacgcccctataattgagagctgtctaggggtcaggtacttttctcagtgccttgtgtacattatttccttttatctttctagattattaattttcttgttattatccccatataatagaggagtaaacagtgtgaaaatagcactaaactgttgatcttttccatgttccaaactaaccttaaatgttaggctaatattataaaattttaaaatttagtcatttgttctgggtctggcttccatgaacttaaccaaaatgcttggctgtttctgcattctagctttttgggatttagagaaaaagcaacttggtcatcatagtggccaggatttatttatgtgccaataactcccctctgtttttagctttttgatctgttacatctcagatactttattctctatttgtaaaacaaccacattcctccttttctatatctaagtgaaaaaaaatgcccgttcatactagctacatggttagcatatatgtttcttcctctttgtgggtttgagttgaaacttcttttgcaaagcttaactatagataggtcttccacagaaccctgtttaaatgccttgtggaagtagaagggacatatcttaatattccttataatctgtgttattatttggactttcctcagttccttatatgtctttgtatgtcaaacattgagttatgcttacattactctaggtatagttgtgtcctagctttgtacaaggttacaataatggtggtttccttgttttcagcttcattcttgatcatgcctaacattttttgatggttttagcctcggagaacagtctactgctatttctccctttttcctgatcccaacaaatagtttagaaatctttgtcttaactgcaattgggatcatttttcctttagagttgcccacagttagtcatgtccgtcactcttcactcactcaaatgacctcaaaagatttacctgcaatttaagcctttcaccttggcattttctacctggaactctggcgtactctgtgggatcagtgagatccatagtgtgcactccctagcagatcgtgaatgtttgttgataactataattcattgtttagtcttgtctatacagagaagcagtagcaccttgctttagtaggatcctttatgcttttattcattattgaattttatcttcacaataattctgtggttctgcagttgtcattatttcagtttgggagttgaggaaactgagatcgtggcaaatcaacttttcccatttaaatccactatttcatcgctaatccagggttataacccaagactaactgctagtcaaagttgctttctaaaaatcagttacacagacttctaattctcgtgctgtacagtcagtgcagaaattgcaacagaactgttctttgttctgtagcaatgtgtattcaaaaggtaatcatttcttgtgtataaataacattcctccctaagagagatgttgtgggaatttatatcagtcaagaatgtatatcgataattaaacatagctagtctaaaaaacttgaagtgaaagattggttcgtattcaatcaactgaactgtttctttctctgcaatattgtggttcttgacatgattgctgagtttccaatttgacacttctggaggttcgtaaatcaggacacatgctgggtctcagtctgtcatcctgagtcttagcattggttatttatttccctttattacccaacatctatttactgcacaaattagtcgagaagctttccatgacggacctttgtgagaaaaaaaaaatgtgtacattgggtagctcttcaattacaaacatgcacagattgtctgggtttatgtgcatatactttattattatttcacttttgtatgtcagatgaatttggtgtaaatgtaaatctaacaatatgggctctagtggccaaatacattgccataatatgtttttgatctgtcagtctcctgggtgaagtgtcgcaagtgtggtaaaattctgtagtataaattgatgctcagttatggacaattaccaggtctatatgatgtcagactaccacactgatccacttttaggataacagcttcgctctgatgatcttcagattttagatttgctttcattccttgacaaaatgaaatacatttaaaacttctaaaattgtcttttgtatatatttctgcagggtctactcttgggactactataacaatcaattgtactgctttgtttcttttattaaatagcagaatagctgcttgattcgtctgtatgtgctgatgtgtgtctgtgaatctagtccagttcactgtccaataagaatttctgaaatgttctttgtcacatcaatgtacagtcaaaatcgtattgtgtttgtagcagaatgattgcatcttttattattcacagcagccaaaatgacacatatttcacacgtgacaccttttttaaaaaagatgaattgtccaaagttgtatgtagaatatatttcacaaatcaaattccctatttaataaatggtgctgggagaactggctagccatatgcagaagagtgaatttctataaatagaatgcaactgtgtaaatagcatccaaatcaagaaacataatataatatagccagaagctcaggatcccccttcatgtcttctccagtcatgaacatttcacaagggtgactactatccttacttcaaaagttttctattactttttcctgtttttgtgtattatatgaaggaatcgaacagtcatatctacttgtctgtggctgtatttttccccccaacaatatgtttgtgagattcatccatattattgtatgtagttgtggattgttcacttttcttactgaataatattctattgataccacagtgtatttacacatgttgatatagatgagaaattgagtagtttccaacatgaggaaattgctgtcaacaattctgcaatccatagccatgctatcaacagtctagtacatggtttttggtgaatatattaataactatgcatttctgttggatatacacctgggagtggaattacaactcaaataatattcattttaaaaattttatttcgtttttagtcgacaactatattatggggtacattgtgatgtttcaatccatatatatacattgtggaataatcaaatcaggctaatagcatatctatcacctcaaatacttctcatttttgtggtgagaatatttaaaatcctcctttttagctatttggaaatatacaatatgacaatattagctatagttcctgtgctgtgcaaaagaacaccagaacttattcctcctgtctaactggaactttgtacccattgataaacgtctctcatttttccatccacccaccactgcagcttttgatcaccaccataatactctccatttctatgagttcaactttttttaaactgcacatacaaatgagattatatgatatgtgtctctctgtgccaagtttatttcacttaacctaatgtcctccaggctcatccttattattccaaatgacagaatttcctaggtttttaaaattttttttttatttttaattttttggggtacatagtaggtatatatatttacggggtacatgaggtgttttgatataggcatgtaatgtgaaacaagcacatcatggagaatgaggcatccatcctgtcaagcatttatcctttgtgctacaaacaatgtaattgtacttttagttattttttaatgtacaattaaattattattgactatagtccccctgttgcactatcaaatactaggtcttactcattctttctaactattttttgtagccgctaacaatccccacctatcccctacctccacactaccctttgtagcctctggtaaccatccttttattctgtctccatgagttcaatagttttaatttttagatcccacaaataagtgagaacatgcagtgattttcgttctgtgactggcttatttcatttaatgtaatgacctccagttccatccaagatgttgcaaatgacaggatataattcttttttattgctaaatagtaccgcatcatttatatgagccacattttctgtatccattcgcatgttgatggacagttagcttgcttccaaatcttgcctgttgtgaacagtgctacaacaatgtgagagtgcagatagctcttcaatacactccctccttttcttttgagtatgtacccagaagtgggatttctggaacatatggtcattctctttttattattttgagaaacattcatactgtctttatggaggccgttactaattcacaatactaccaatagtggataaggtttccttattctctgtatcctcatgaacacttgttatctttcaactttttgataatagccaatccaaaagatatgaggtgatatctcattgtgattttaatttgcattttttgatgattagagatgttgagtattatacatatatgtgtgtgtatatatatatatatatatatatatatatatatgctgtttgtcatcttttgagaatgtctattcatatatttgcccatttttttattagggttatttgttttcttgttattgagtagcttgagttccttgtatattttggatattagcaccttatctaatgtatgatttgcaaatatcttctcccaatctgtgggttgtctctttattccattaattgtttcctttgctgtgcaaagctttttagtttgatgcaatcttacttacctatttttgtgttgattgtgtttgggggtcatatgcaagaaaccactgcccagaccaatgtcatggagctcttctcttatgtttttgtagtttttagtttcaggtattacatttaaggctttaatccattttgagttgattcttgtataaggggtgagataagggtccagttttattctgtatgtgaacattcagttttcccaataccatttattgaagagactgtcctctccctattgtgtgttcttgctacctttgtcaaaaatcaattgatcaaaggtgtgtaggtttattttagtcctctttgtcttattccattggtctgtttttatgtacttgccatgctgttttgattattatagctttgtaatacattttgaaatccagtagtgacatacttccaattttattctttttagtaaagacagctttggctatccagggtcttttgtggttccatgcaaattttaggattttttaaaaaaaattctataaagaacaatatgcagattttgttagtattgtgtcgaatctttagattgctttatgtttaacaatattaatttttccaatttatgaacacagaaatctttccatttatttgtgtcatcttcaatttctttcgtcagtgtcttatagtttcaacacgcagatctttcactttcttggttaaattcactccaaatattttttcatgctattataagtgagattgtttccttaatttctattttagacagtttgttgttattgtacaaacaataacaattgttatcgctactgatttttgtaagttgattttgtaccctgcaactttactaaacttgtgtatgaattctaacagttttcagtggagtccttaggatttgctgtataagattatgtcatcagcaagaaggggcaattttacttcatccttttcagtttggttgccttttatttctttctcctgcctaattgctctggctaggactcccagtactaagttaaacaagggtggggagagtgggcatctttgtcttgctcctgatcttagagaaaagccttctacgttttactgttgtgcatgatgttagctgtgggcttgtaatttatggcttttattcttttggagaacatttcttctatacctaatttgctaagagtttttctcataaaaggatgttgaattttgtcaaatgctctttctgagtttattaaaatgatcatacggtttttgtacttcattctgttatatgttgaatcacatttattaatttgcatatattgaaacaaccttctatcccagggataaatccctcttggtcatggtgaataatccttctaataaactattaaatatggttcactagtatttcattgagaatttttgcatctaatttcattcgtgatattggcctatagttttctttccttgtagtgtctttgcctggctttgggatcagggtattgctggccttgtaaaataaatttggacgaatcccttcctctttagttttccaaaagagtttgagaaagatttgtgttaggtcttctttaaatgtttgtagaattctcccatgaagccatctggtcttgagctttcctttgatgtgagaacttttaaatactgatgcaatctccttaactctttccttagctgttactggtcttttcagatttccaattttcattattcagttttggtagattatgtatttctaagaattcatccatttctgttaggatgtccaatttcttggtatataattgttcatcgtagtctcttaggatcctttgtatttctgtgttatcagtcataatgtcttctctttgatttctgatttgatttatttgagcctgctctcttcattcttagtctagctaaggatttgtcaattgtgtttagcttttcaaaaaaccaacttttagttttattgactttttttctattgtttctctagtctctatttcatttatttctgctctgatctttgttattttcttctttctgctaactttgggcttaattcattcttctttttgtagtttcctgaggtataatgttaggtatttcatttgagatatttcttcttttttgatgtaggaatttattgatataaacttccctcttagcactgcttttgctacccccagaagtttttctatgttgtgttttcatttctgtttgtctcaagacttttaaaaaatttcctcttgaatttcttcttttgacccaataattgtttaggagcatattgtttagtttccacatatttcttaattttatatgatttctcatgtaattgatttctaattttatattgtggtcagaaaagatacacgatgggttttcttaaatttgttgagacttgtctgtggcctaacatatgatctatcctggagaatgttacatgtgtacttgagaagaatctgtattttcctactgttcagggcacaatgttctgtatatgtctgttaggtccatttggtctaaaatgtcattcaagtccaatgttttcttatgaatttttctgtctattgcttaaagtggaatattgaaattgcctgctattattatgttataggctatgtttcccttcagatcccttaatgtttgctttatatatttaggtgctctgatttgggatgcttatatacttgttatgtcctcttgatgaaataacctttatcaatatataatgatgttctttgtcactttgaacagatttgacctaaagattattttgtctgaagtaagtgtaactaccctgctctctttttgttctcatgtacatggagtatcttttttcatccctttactttcagtctatgcatgtcctttaaggtgaaatgagccacttgtaggcagcacatatttgggtcttgttttttgttgttgtcgttaatccactcaaccactctatgccttttgattggagagtttaatctatttacattcaaaataatgatggatgggtaaggacttactagtgtcattttgttcattgtttcctggttgtcttacagattctttgttcctttcttcctctattgctgtcttcctttgtgttttgatggttttgtgtagtagtatactttgggtcttttgtttttatcattcatgtatgtattataagtttgtgctttgtggatactccgaggcttacataaaacattttataagctgataataacttaaatttgattgtgtgcatatactcaacactttgactctccctcctcccacattttatgtttctaacatcacaacttacttttttttttaattatactttaagttctagggtacatgtgcacaacttgcaggtttgttacatatctatacatgtgccgtgttggtatgctccacccattaacttgtcatttacattaggtatatctcccaatgctatccctcccccgtcccctcaccccacgacaggccccggtgtgtgatgttccccttcctgcgtccaggtgttctcattgttcaattcccacctatgagtgagaacatgcggtgtttggttttctgtccttgtgatagtttgctgagaaagatgatttccagcttcatccatgtccctacaaaggatgtgaactcatccttttttatggttgcatagtattccatggtgtatatgtgccacattttcttaatccagtctatcattgatggacatttggattggttccaggtctttgctattgtgaatagtgcagcaataaacatacctgtgcatgtatctttacagcagcaggatttataatcctttgggtatatacccagtaatgggatagctgggtcaaatggtatttctagttctagatccctgaggaatcgccacactgacttccacaatggttgaactagtttacagtctcactaacagtgtaaagtgttcctatttctccacatcctctccagcacctgttgtttcctgactttttaatgattgccattctaactggtgtgagatggtatctcattgtggttttgatttgcgtttctctgatggccagtgatgatgagcattttttcatgtgtcttttggctgcataaatgtcttcttttgagaagtgtctgttcatatccttcgcccactttttgatggggttgtttgttttttcttgtaagtttgtttgagttctttgtagattctggatattagccctttgtcagatgagtagattgcaaaaattttctcccattctgtaggctgcctgttcactctgatggtagtttcttttgctgtgcagaagctctttagtttcattagatcccatttgtccgttttggcttttgttgccattgcttttggtgttttagacatgaagtccttgcccatgcctacgtcctgaatggtattgcctaggttttcttctagggtttttatggttttaggtctaacattaagtcttcaatccatcttgaattaatttttgtatatggtataaggaagggatccagtttcagctctctacatatggctagccagttttcccagcaccatttattaaatagggaatcctttccccatttcttgtttttgtcaggtttgtcaaagatcagatggttgtagatgtgtggtattatttctgagagctctgttctgttccattggtgtatatctctgttttggtaccagtaccatgctgttttggttaccgtagccttgtagtatagtttgaagtcaggtagcgtgatgcctccagctttgttcttttggctcaggattgtcttggcaatgtgggctcttttttggttccatatgaactttaaagtagttttttccaattctgtgaagaaagtcattggtagcttgatggggatggcattgaatctataaatttccttgggcagtatggccattttcacgatattgattcttcctatccatgagcatggaatgttcttccatttgtttgtgtcctcttttatttccttgagcagtggtttgtagttctccttgaagaggtccttcacatcccttgtaagttgtatttgtaggtattttattctctttgaagcaattgtgaatgagagttcactcatgatttggctctctgtttgtctgttattggtgtataagaatgcttgtgatttttgcacattgattttatatcctgagactttgctgaagttgcttatcagcttaaggagattttgggctgagacgatggggttttctaaatatacaatcatgtcgtctgcaaacagggacaatttgacttcctcttttcctaattgaataccctttatttctttttcctgcctgatcgccctggccagaacttccaacactatgttgaataggagtggtgagagagggcatccctgtcttgtgccagttttcaaagggaatgcttccagttttgcccattcagtatgatattggctgtgggtttgtcataaatagctcttactattttgagatacgtcccatcaatacctaatttatcgagagtttttagcatgaagggctgttgaatttggtcaagggccttttctgcatctattgagataaccatgtggtttttgtcgttggttctgtttatatgctggattacatttattgatttgcgtatgttgaaccagccttgcatcccagggatgaagcccacttgatcatggtggataagctttttgatgtgctgctggattcggtttgccagtattttattgaggatttttgcatcgatgttcatcagggatatttgtctaaaattctctttttttgttgtgtctctgccaggctttggtatcaggatgatgctggcctcataaaatgagttagggaggattccctctttttctattgattggaatagttttagaaggaatgataccagttcctctttgcacctctggtagaattcggctgtgaatccgtctggtcctggactttttttggtttgtaggctattaattattgcctcaatttcagagcctgttattggtctattcagggattcaacttcttcctggtttagtcttgggaaggtgtatgtgtgcaggaatttatccatttcttctagattttctagtttatttgcgtagaggtgtttatagtattctctgatggtagtttgtatttctgtggtgtcggtggtgatatcccctttatcattttttattgcatctatttgattcttctctcttttcttctttattagtcttactagcggtctatcaattctgttgatcttttcaaaaaactggctcctggattcattgatttttttgaagggttttttgtgtctggatcttgtaggtatgcttcattgtttcttattatttttttcttttgtcttctctggctgtgtattttcaaataggctgtctgcctacaagatccagaaaatagcctcaaaagggtcaatctaagagttattggccttaaacaggaggtagagaaagagatagggatagaaagttgatacaaagggacaatatcagagaacttcagaaacagagaaagataccaacattcaagtacgacaaagttatagaacaccaagcagaattatctcagagactacctcaaggcatgcaataatcaaactcccacaggtcaaggataaagaaagaatcctaaaagcagcaagagaaaggaaacaaataacatgcagtggagcttcaatacatctggcagcagatttttcggtggaaatcttaggccccgggcatatccagagatgctgtctgagggccagtcattggagtcaaaaaccttagcagtttacctcatgttctattctattgtggctaagctagcactcacaccacaatataaagtgctccctgctcttccttgcccttttaaaaggcagaggatcctctccctgtggccctcaccaccatgagggttctgcttggcctccactggtgttcacttaaagcccaagggctcttccatcagcttgtggtgaatgctgagagaactgggacccatattttagggccttgggctcccctctggcccaaggcaggaccaaaaatgctgtccaagaacctaggccaggactcagaaatcccagaagcctgcctgcttctctgcctttctgtggctgagctggtacctaaggggcaagacaaagtcccctttacttttctgtctacttttctcaaacagaaggggtctttcaccataaccaccacagctgggaatttgctgggtgacctatgaagccagcacatctcagaggccaagtcccacagtgtactccctgggtattgcaactggttattcaacgttcaaggcctctttagttagtagctgatgaatcctgataggactgagtccttccctttaaggtagcagattcccttttggcccagggtgtgtctagaaatgctatccaggaactagggcctggaatgggggcctcatgactctgcccatgccccatcctactgtggctgagctggtatccaagatgcaagacaaagtcttctttacttttcgctctcttctccttaacgagaagtaaggagtcacttctgttgctgcaagcttcactgctgggagtaggggaggtatggtgcaaccactcccttagccatgccagctggtgtctccctaggtcatgtgggagaccctaatccactggcttcaatatatagagggacgtttctaaattatttatctgtaatttgattaagaagatagacacaggcaataggatatgccaacagattctctctaacctatagttattttaagaaagttagggaaagagaggtcattgattagttttggcttactgaattatttgaccctcccatatcttttaatttatggattttatataaggcacagatattctactagtaaacatgacattaaagatgttttatacaaatgaatgtggttgatacaaaggcattaaataagaaacaaaggaaattcagaggacatttgttcgcctggaatagagatcattagcataagcataagaggaaaataaggaaggaaatgggaaagtcttgagtccattttcaaattatgaaaacttgaaatgcaacaaacaaatagtggttacttaagaagaaagactgaagatgctgggcaaaggttaactttagaaatggcatttttatatcattataaagagaaagtggggataatggaaataatctacatgtacaactcatttgacagacatttattgaaggtattccaaatgccaaacactagtttgtgcactaaggatgtttttaatttttactttttactttatttttattttctagcttcttccgctttgccagagaaggatttttttaaatggataaaatactaacttaggctagcttctttcagaaacagacctttaaacaatgattaatggtgaaagtggtttggttgtaatgtgatcccaggaagtaccagtaggagagtgggacaatgagataataaatgaaagaagccaataattaagccagttatggaactagttattgctttgggccactggggtttgatcctgatgaaggagctctgggagatagtaaacaaacaaacaaacaaaaaacatgcctcaaagttgtcaaccacaagggggtaaaggcaaggaaccagggctaactattccaactcttatccatcattggctaaatgcttcctggtacataaactttccagcacttctggccagcgcacctagcaagctgaggaaaatctctcaggtttgcagtagggcaaatgcttgtactaggacactgctggcatatacttgaaggatgagtgccaacggcagatagatgggccctgacagcatcttctacagattctgtccttgcctttgaggcaaggacactgtctagagtcagagacagaaatgtaaaatgtaaaaatgtaaatcatagtagcacacagtacaagttttaaaatcttaacaaagtgttatgggagaaccacggtgagagaaaatgactgcacatatgagagcaggggaagtctttatatgtgatgatgacatttgagtgggtgttccgttatcaaagatctacttaaaagggaaaaagagtagaattattttaaaccatggatgtaaccaggcgtggccaccctatatgtgaatgtcctgggataattttgtccccagatgtctctctttttgagtgtcattttcatttatgtattcataatataaagaaattgaatagaaagaggtaaacattggtggcaaaaatcccttcctacccataaggctcacagaataatgttgtctaaatgccataacatttttggtaagttttggttctatgggctttggaaattttttatgtaggaactcctccaaggtgatataagcattcagtgtatttatctagataccctagttaaagctactttaagcaggatcaaagtcctcttttaaacttttgtatttgaaagctattcccatgtacaattcccatgattcttgtacaattcctaggagacctttgtttacatcaaaagagtttgtctctctctataagttagaacttgtacattgtagtaatggaaaatccatttcaaagtagcttagacttactcagacaaaatgtattgatcagtgtcattaaacagttgaaagatagacgaggcttgattcaggaattaaatagcatgaccagattctagttttccttctccattgcatggctctgctccccagtatttgttccgtttaattcctcttaattgttctaagatggatatcaggatactgcagaactacgtgctttctcatccatcttaaacaagaagcaatgggttttctcttttagaatcacgaacaacaacaacaacaacaaaaatcctagagttgtttcattggttctgattgaccttacttggaaccataagtccatctttgaattaaccactaaagccagggagatgagttaaaactaagtacacaccatccacagagcaaagagaggtctattgtgggaaaactgcacaaatggaaaaataacaggggaaacacaggagaaggaggtagttagttaatgttcaatacacgcaccttctcagggacttttcttccatctggcatcatctttgtcttttgaccattttccccaatcaatacctatattcatactcaagttttccatatttgggaaaaaacttctcttgacaccaaactcccctctgacttccttcttataatgatctatggttggatagtctacaatttactgtccttactttttcataggtattttttaatctcctacagtaagatttctaccactgcactgaaatcattttgtgtatggtcttcagggaattccatgtggccaaagccaatggatacttttggcatgggctttggaggtctaacttcttgaatccaagtgtcggctctaacaatcactatctatgtgaccttagaccagttatttaacgctgtctttatttcctcatttgttaaatgaggataattgcagcaatagaaaaagaacgtaaacaattatacttataggattgtatgatgattaagtgattaatgcaaggaaagaacaacacagagcttcagacagtgtagatattcaaataaatgttagttatgatttttattatgtcttgtgacatctatgagatttgaaagtgttaatcactcttgtgtttttgaaaatctttcttttccatgttctataaaagtacactttcttgatattcctcctccttctctagtctttcattcatcttatttgctctttgtgttttatttattctttttacgttgtattttccaggagtccattcccagcccggtgttgggctcagtctatgtgccatataaatgagaatgcacttgcatttgaggctttgctttttatttctctgtagtgacggccaatcccagatttctgtctctcccaaaatacacagctatgctatagatccttcagtcctcctgactaaaatgttagttttatgtgtgtgttcctcacaacctcccagtgaataggtccaaaactgaactcattatcttctccatgctcactctgcattctttggataggcagtgaatagcaccactatctaacaggcacctaaaccagaagccaggtaatctgtcttaaacccttttgttttccaagttcttatcataatggctggtgtctaacagatggtaaataaaatagagactagctggctacatggatggatgtgtggggatgcacagagggatagatggattattgagtgagtctctagcctataaatatttttaattaactaataaattatgataatgtacagttgaaggtcaagggtgaaaaagcataccctcagtgggatgcacaccccaaggagccattttaacttgctacataacacacatatgaccacttttttgctgaaagccttctattattgagcaagcattcaaatcccatgtttgcctgaaataatggttcaggttataaaagtttccttctttttccaggattaaaattatcttcctacataataggaagaactgctttatcttttcctaatatctagagatggccttttaaaaatatagactgttttccctattgaaatgaactgtaggatgtacaaaatatttactggcatgaatcaaaagagcttgctatgtttatgtgaaaaccactaggcattctaaaaaatattgctagcatagtaaaatgttagtaattaagactaacgaaagcgaaggcaaattggaatcagagactatttttaaggaatgtcaactgtattattttcaaatacacatggtacataacagtaggatatgagaaaaagtcccaagtatgtgtactaaagtagcctgctatgataagttgaaaaagggtttgtaattggaatatccacagaatatttcagaacacttaaagacattttcatttacactttatacagctttcttataagagcatttacaccatttattttataaaccaaagattaattagaagactaaacaattacaaggcctcaactacgaaagctgttccactacctagtggaacaacaacaatgagacacacaaaacaatggcgttcaaagattagagagagacttacggttaaacagaggttgacatgttaactgaagttgcaatataatatgtcgactagttttgcaatacatagcaaacacccaaacagaaataaacctgataaaaaaacagtagtctataatgtgtgccacttactgagttttaattattctggggactatatttttgatttcatgttacaatcactagttttgtggggtctttctagtcctgatgcttatttacaaaatatctgaagtatttctttctatgtatttatttttgagatggagttttgctctgtcacccaggctggagtgcagcggcatgatctcggctcactgcaacctctgcctcccgggttcaagtgattctcctgcctcagcctcctgagtagctgggattacaggcgtgtgctaatttttgtatttttagtagagactgggtttcagcatgtcggtcaggctggtctcgaactcctgacctcatgatccacccgctttggcctcccagagacctgggattacaggcgtgagccaccgcacctggccatctcaagtatttctttaacttataacttcacataactttgtggaggcaacagggttaattaaaaaggactttacttacataacaaaataagaagcatagttttatattcctgtgccatatacattttgtttgtccatctgtagccattctttgaccttctctcccttgctctttattctgggaggctgacctctgtcatcattgggctcccatgccctttggcttccagttggtttaggcacccaagagccctagaaggaaattgaagacaggaggtaaagtgaggtcaagatatttattctcctaattccctccctttgaggttgccacaggctgactatgtcctttgacaaaaggttattgctcttctcagggtggtttctcattccaattctctgcttttggccacttttccctcccctcatcccttgggcctagatgtagtaacagctctactgttgcaaggttcttgtattatctgtgatggtttcttataccctgcttatcttgtgatttgttgctttgtagataaacctctcagattatctaggcaagatcatagaagaacacgtatgtccagctaagatattccagaagacagtagggaaacattgaagggttttataagagggagtgcagtgatcagatttatgttagttttaatctttaattggggtagaatttacattctaaaacagagatttgggtctgggaggatgatatagagcctcttatggatgtgagggcaaaaaatgatagaggtttgcagtgccaatagaaagaggaaagaagttatatatgagagaaatttgtaactaattatatgaggtgttgggtgacgcttaggaaagaatctagaatgtctatcaggtttcatgcttaagggataaagtagatggcagttttattacttgttttctgtattatttttatttcataaaaccagcttagagaagttgcatagaaaaaataatgtagtcctgtttattttaatatttgaaaagaacatatttcagagtagaatctatatagtacctccctcttggacttccaatgataccagtgatagcctcaatataagccagtcttacaaaatgcacccagcgtgaattcttaggtattgttaaaagaagttggccaggcgcggtggctcacgcctgtaatcccagcactttgggaggccgaggcaggtggatcacctgaggtcaggagtttgagaccagcccggccaacatggtgaaaccctgtctctattaaaaatacaaaaaaaaaaaattagctgggcatgatggcacgtgcctgtagttcctgctactcgggaggctgagacaggaggatagcttgaacccgggaggcggaggttgcagtgagcggagattgcaccattgcactccagcctgggttacaagagcaaaactccatcaaaaaaaaaaaagaaagaaaaagaagaagtttctaatacacttatcttcccttgggttcactcagaagacccttggaaaaggttttaagagcaagtgatttatttggggggtaaattaatcagtagaagagtggaaaaatgagacaggtgaggcaaggcagccagtaaagagtggtgcattatcaagccagctgctgttgtgggtcactggagctttatcccttgggaaactctggaacccttgtaaaatacatgcctcagagttatttcccctagcatcaagggagctagtgtaacaatatcccaattcctacaattagtcattatatacaggctgcctctgggagctggaggggaggcatcagttgcctggtatgtctagcctgtcacatggatggcaaagcaaactcctgtggcaacagaaagccttcaggcaatgaaatgctggcactgggaaatcaggctgatgggtgctgaagtggcaaggatgaggggatatggatattctgctgtagtgcttttctaacagatgattcatatttggttctagggatcaagaattgagttaaaattttatatatatgttgatgttctatgtcaccttcaggaaaataatttaacagaaactaatatttgccatcaaaaaagcaaagaatcctgttgttcatcatcctagccataacacaatgaataattttttaaataagcaacataaatgtgagataacgtttggaagttacatttaaaatgtctcctccagactagcatttactactatatatttatttttccttttattctagttgaaagaattcagaatcagtgggatgaagtacaagaacaccttcagaaccggaggcaacagttgaatgaaatgttaaaggattcaacacaatggctggaagctaaggaagaagctgagcaggtcttaggacaggccagagccaagcttgagtcatggaaggagggtccctatacagtagatgcaatccaaaagaaaatcacagaaaccaaggttagtatcaaagatacctttttaaaataaaatactggttacatttgataaaattataccatagattgtaatttaatgatgtttaatgtaaagttattaacagaaaatcacgttaaagctgaaatgaacagtagactttgtatatttattttcttagagacagagtctcactgtcacccaggctaaagtgcagtggcacaatcatagctcactgagccttgaactctggggctcaagcagtcctcctgcctcagcctccctagtagctgggactactagccaggcgtgtaccaccacgcctggctaattttttaaaaatttttgttttctgtagagatgggttcttgaactcttggcctcaagcaattctccttccttggcctcccaaagcactaggattacaggcatgagttagcatgcctagccagtagacttttgagtcaaggtagagaatagaggaaaattgacagctaatgtcaatgttaaagttaattttgtttagtaatctggatatagttggctggttttctgttgcaccatctttaagatcacttcaaaattggtatacgtatttatgtagttgcatgaagtcaaccattcgggcttaattccttcctagaaaaagtaacaggtctactctttcatatcttatttggaggccctggatcaagaaatgggggtgagtgggtatcaggattggggaggaataaggagtactctcactttctccccccattctcttacctccagcccagctcattcttctcttctttctctttcctctgaaatttcctcaaatatctgtctgcttagtagtctataattcctcaggataaaagaaaaaggaaaaggaagaaaattgcttaataactatgttttatcaagcagcatgcatagtgctttgcatgcgtttaatcccttcaaacttagtatttactagtcagtttgaaaagcccttaaatgttaaacaatggttaagctttagggtattttgagcagggaagtaacatggtaggaggttgatcagattgggcacttgatcaaaaccctctatagatattttatctgacagaaaaggccttttgctaaaccagtatctgattctcaaattggttatgtcatctaagaaggaaaccgtatcattttcttggatgaaatggcttccatttccaaattagtcaggttaggctatgctaagctatagtaagaaatgaactctgaaatctcaatagcttaacacaataaagactgctttcttggttatatcatagtccagtagaggttgacaagccattcttaggagctgtcccccaacatggtcacttggaaacccagacttttccaattttgtgacacttgtcattttcaacacactgccaaaagccactgcagaaaaggaagacagaatgtggtcagtcaatccatggtgttttatggccaggcctggaaattatgtatatcacttccaccacatcccatcacacagaacttgttctcgattgaatttcaggaagagttaatggaattagtgagcttttagccaatctctgtcatagccattttatcgaagggacctgagctgctatgaggacaaggttttagtttatatgatgaggatgttagaaagccacatagaattttacagtcttatcattagctctgttggagtcaaaatctaggtgaataaaaattctttcaagagacacatgttaccactaatggttttttcaatggatgagcatagatgaattaggaatctccaatggtcattttcctaattcctggtctgactatgtaatatatagaatcatgtggttattcttgaaagctctagtcatattcgtgaggtagtcagcatgttatgctacttctttttcttctctataagtttcggatactatgaatctattggatcacaaaccaaagtagttaactggtaagaaggtataagcagaaaatacgaagtttggactggatccttgagttagatgagaagaaggagagatgagaggcatacagtgatagatttgactagggcaagaggactctggtagttagcaaatgagaaataaatttaacctaagaaaatcctaaagtgatggtaagaatggttagggtttaattgctcttagaagagcaagtagctttaaataagagacaaaaatatctgcagaaggaaatatgaaagtagaaaacaaaacaattgcattgtcaaaacatgtaagatgttttaatcacctaaaataaaaccagaattgtattataattgctatcctttgtcaaacttttgaaattaaaaaaaaaaaacgctttggaatggtctaaaactacatcataaaaatggctcagccactatctatagagattgacattttttgtttgtgctctgtgtttaggaatttaatgatgtgtattgctgcagattcaatgtaagttcccgatacagataaagatggccaaagctgtaattttttcatccatttcttgaatgatgtatgctaaaattaaagtaatcctaatgttaataataacttttagtgaatgcttgctgtgtgtcaaaaagtatgctagtcactttatatatattggtttatttcatcctttcaaaaacactctttgaaaagtactcttattattcttagtttgcagagaagaaaactgaaggctagagaagttcagaatcttcttttgaaagtagtagagttgtgatgcgaatgcatagcaattactcttgtagatgacctcacaggcttcctcttccaattgtctacgtggctaaaacaaagcaagaaaaccccataagaatctgaaaaagactcatgtaattattaattgacaaataagattatattacattactgataaaccaacaggtagaaaatgaaagcaatgaaatagtatactgcgaaaaaaaatttcatattatattctttgatgaaaaaataaaacaataattgcaaactgcatttcatttttaatgaaacgacaatgtttaattcttctaaaaggtagggagcaaataaaatggttatctggtctttacatcgaatgtgtcatcactactaagtgatattagctggcttattacttaaaattttcttttaggaaaaaagtgtgaaaatagacaggaggagacattaaatggctaaagcaacacccccttgctccgtaagttctttctgagtctgtgtgcctaagattaacaagagagcctgtgagcctcacaaggcaatcacaaagctatgtctacagccttggagagctgtgattacagcagccagcctcctttgcagcacctcagtgatgactacactaactctcactactgagcaacaatgaaatgtttcaaacccaaccaccaacactgttataactcttaaaatttgagccagtcaccatacctgaacgtaaaaagaaaattaccaaaaatgcttgataccaaaaagcaattaatgattcataattgctaatctttattgacagtctcttctagttcttatctacatatattttaattgtctacataatgtaaattaaattttaaattctgatttgtaaacttaatattgcataaatatttatcaatgttgttaaacatcttttaataattattttaacttctttatattatttcattaatttccatctttatgtccttgctggtctgacatttagaaaaaactcctccttttatttagaaaaaaagaatggtgaggccgggcgcggtggctcatacctgtaatcccagcactttgggaggccgaggcaggcagatcacgagatcaggagtttgagaccggcctgaccaacatggtgaaaccctgtctctactaaaaatacaaaaactagcctggcgtggtgctgcatgcctgtagtcccagctacttgggaggctgaggcaggggaatcgcttgaacccgggaggcggaggttgcagtgagccaagatcacgccactgcactccagcctgggtgacagagcaagactctgtctcaaaaatacataaataaggagaataaatggggacaataacaacctattcacagaacagaaataaaaccggagatgtcatgtggaaaaagcttatcttgaaagcgtggtcagagtggaaagaaacagcaacaggagagtcttgatttggtgaaaaaacagaatgcagatggcatagagtatcaacaattaattagcaggccatcaagagacggccataacatattggtaattgttttctttcacccttaattttttctaaaacaaaaacatgaagttagaaagtagttaattttgttagccacatggcttcatggtttaattttatcttctctatgggcctggtacaacaataaagttcttttgagatagaaagacagatgttaggcaaaaacatacaagattttcattctaatcaaaatctttgccaataggctatgacagaatcctatgagagatgatgccatttagaactttcacaagaggcaaaaatagtatgccattggcacctaaaactgccaacagtgatcatcataggatttatttcatttggcggattcttggttgagttcataacctgttccctaggcttttaagattggtccaaacttggcaatggattctttggaaaaattatttcttgatcgttttaaactttcttttccagtgtcaagagagattttcccaggctccgagttttcatttattttttcccctgtcagtttttgaaagagaaatcccctttttgtcggctttgtgattgcttttgtgtcaaattcagcgtaaaagcttttcaaacgtgacagcattagctgttttgtgcttggctgagctaagagtacatgaattcaatagagaagtgaaatcttgtttgagcctggctgatttggctatataatattgaaaactatctgaagcaagaaattcaatacttttcaaattattgaataaacatttctaaggctgcaaaatctctgtgtttttgaaggcattctttaggaaacttgaaacacagacattctataatcacataattaattttaaaagttgaacttattgtatgtagtaactaaggcagctatttgagtgtctcaaattattttactaaaaagggagacatttttcaaatatggaagtagtgccttacatttttagttatctgtggaaggatcgatggcatcatatatctcatccaccataaaaatatgtacggtagtggaaactgaatttttcttttatatattttgtgtattttttggagttgtacaaaattaaatcagcaaattgacccacactagtagtttgaggtttgggtttctggtacaataatgaaaagcattattagaaatcttcttgccaggacctaccatttcttcatgtattttctttattcccttttgttctcccctaaagcttctatgtgattaaagagaaaagatcaataacccaatagtacttttccttctaaagtatgcatgaaactcttaaagttctcaaagcatacaaacagagtgctctctacattgctgatagaacacaggtagtaatgggctagtttccccaggtaactattatattatataaatatttaatgcagagtcaccaagccttgaataactttatgctttgattgtaccatattttctctagtttgcttttcacaatttaacttatcccgtgcttgaaaatataatgtggtaactgtgtaaatctgctcctcaaaaaattttcgaaatcatcttttcttttttcttttctttctttttttcctttttttgagatggagtctcactctgtcacccaggctggagtgcagtggcatgatcttggcttagtgcaacctccacctcctgtgatcaagtgagtctctcagcatcccaagtagatggaactacaggcacattccaccacgcccaactatttctcgtgtttttagtagagacagggtttcactatgttggccaggctggtctcaaactcctgacctcgagtgttccgcccacttcagcctcccaaagtgctgggatacaggcgtgagccaacatgcctggccccacatcgccttttctgaaccctgggaattaaccaaaggctggcaacaatttttgaaatgctgactctcaataaaaatggcaaagtttgaggttttttaagttggcctttcccgtcactttctcccagctccacagtagccttgaaaatcagtagccttgcaaccataatagctgtgaaaactagcagccttttagccaccagagagtgtagaccaggattggaattcttcaaaaaggccaattttattccaagaaccttgccactgtttgacctatcttgcagctccctggaataaacctatatacatggccttgcctttatttggcccgacttagagataactttctaggaaaagccctagctccagggtgttggtccaaaccaattagcagcaattctttaacataacaggttcctaaggctgtgatgctagttgagataaacataggtctggagaaaaacttccagtgaagctctggagaatgaggtgtccataggggattttggcaacctctgacatgttcttgcgggatctagaagcccatgtgcttgtcttaacaaatagagagtatcaataaagagatagaaattgtaaataagaactcagtggaatatctggagttggaaagcacaataactaaaattaaattttcacttgacgtcagattcaagctgcaaaagaaagaatcagcaaacttgaaaataggtaaatgggataatccaatccaaagaaaagaaagaaaaaatattaaggaaatacagaaagcaaaaactgactgaactgaaagaagaattaggtaattcaacaaaaatagttggagacttcaacatctcacttttaataacaggtaaaagaactaggcaaattaacaaggaaatagacacttgaaaaagactataaagactataaacttacaagacctaacagatatctatacagcgtttcatccaataatagcagaatactcattcttttcaactgtacacgaaatattctctagggtaggccatatgctaggtcataaaataagtctcactacattcaaagggattaaaatcatacaatgcagattttatgaccataatggagtacaattaaaaatcagtaacagatgtaaatttgggagttcataaatatgagaaaattatacaacacactcttaaatagccaatgggacaaagaagaaataagaaaatacaaaaatatcttgagataaatggaaataaaaatacaatataccaaaacttatgggaggaggctgaagcagtgcttagagtaaaatgtataactataaatacctatatttaaaaaggaaaaagatctgaaatcagtagcctaagcttctaccttaagaaactagaaaaagaagagaaaagtaaatctacagtaagcagcaggaagtaataacaattagtgtgaaaaaaatcagatagaggaagaaaatataatagaaaaaatcaacaaaaccaaaatctagaaatttagttatttgaaaaggtcaacaaaattgacaaagttttagctgattggttaggaaagaaatggtcaaattactaatattagagaaaaagagggtgcattactaccaacattacagaaataaaaagaagtaaaagaggatattatgaacaactaaacaaatagataacctggatagacctataacaagaaattgaattggtattaaaaacttctcccaatgaaaggctcaggcccagaagtcttcccccgatgaattctaccaaacatataaacaactcttccaaaaaatagaagagaaaggaacacttcctaaccagacaaagatatcacaagaaaacaagctacagagcaatatgccttatgaatatagacttgaaacgcctcaaaaaattatcaaacctaatacaacaacatattaacatgattgctaccataaccaggtaagatttatcacaggaatgtaaggttggtttaacatccaaaatttaatcaatgtattataccatatcaatagaataaaggacaaaaatcgtatggtcatcacaataaatatagaaaattcatgtgacaaagtacaaaaccctttcaagcttgaaaaataaagaacacttaacaaatgaagaatagaaggtattggccaggtgtggtggctcacgcctgtaatcccagcactttgggaggccgaggcagttggatcacgaggtcaggagattgagaccatcctggctaacacggtaaaaccccgtctctgctaaaaatacaaaaaattagctgggcacggtggcgggcgcctgtagtcccagctactcaggaggctgaggcaggagaatggcgcgaaccctggaggcagagtttgcagtgagccgagacagcagcactgcagtccggcctgggcgaaagagcgagactccgtctaaaaaaaaaaaaaaaaagaaggttttgtggattgaatagtgtcccccgctcccaaaagacatactaaaagcctgagcccaggtatctgcaaatgtgaccttatgtagaaatagagtctttgcagatgcagtcaagttaagatggtatttttataagaagaggaaaagaggcatacacagagagaagaatgccacataaaggcactgaccacgggaaaaacaccatgtgatgttacagttagagattaaagtgctacagttgcaagacaagtaaaactaatgattaacggccatcattagaagcaaggaagaggcaaggaaaaattctcccctacaggtttcagcaggagtatgggcctgctggaatcttgattttggatctagcctccagaagtctgagacaatgagttttgtctacccagctacgcaaattgtgacacttaattacagaagcccgaggaaacgaatacagaagaggatttcctcaacctgataaaaggcagctacaaaaattccacagctaatgttattgtgaaacactgaatgctttcccctaagatcaggaaatagtgaaggatgcctggtctcaccacttctattcagtattgtactggaagttcaggccagggaaattaggcaagaaaaataaataaaagacatccagattagaaaggaataagtaaaattatctctacttgcagacaacatgaccttgtaattagaaaattttgaagaatctatgaaaaaatattagaaataataaaataattcagcaaatttgtaggatacaagatcaatatacaaaatgaattattttatacattaaaaatgaataatctaaaagtgaaattaagaaaatatttacaatggcatcaaaaaatgttaaaaacttaggaataaaagagatgcaaggcttgtatactgaagaatacaaagcagtgttgaaagaaattaaagataaaaaaatagaaaaatatcacatgttctcagatcaaaagacttaatattattaagatatcaatatccccccaattgatctacagactctatggaatcattatcaaaatcacaactggcttttttttttttttcagaaattgacaagtggatcctaccatttctattgaaatgcaagggatgtagaatagtcaaaacaaccttgaaaaaagaacaacattggaggagttaactttccaatttcaaaaactactacaaagctacaattattaagtcaatgtggtactagaatgtgaatagacatatagatcaatgaaatagaattgaaagttcaaaagtaaacctttgcatttatggtcaactgatttttgacaagggtaccaagagaattcaatggaaaaagaatagtctttcacaacctggtgctagaataactggatatacacatgaaaaataatgaaatttggccccacctcacaccatacacaaaaattagcttaaatgtatcataaaagaaaacaaataatctgattaaaatgggcaaaacacttaaacatttctcaaaagaagatgtacaaatagctaacgggtttgtgaaaaatgctcaacatcactaatcattggggaaatgcatattacaatcgcagtgagatgtcaccttacacctgttagaatggctgttataaaaagagaagaatgataacaagtgttgatcaaggatatggaaaaaaggtaacacttgtatatcattggtgggaatgtatattagtacaaccattatggagaacagtatggtagctcctcaaaaaactgaaaacagaattaccataggatccagcaatcccacttccgggtatatatccaaaagaatttaaaccagtatgtcaaagagatatcttcactcctgtgtttattgcagcattagtcacaaaagccatgatatggaatcaacctaagtttccatcagtggatgaatggataaagaaaatgtggtacatatacacaatggagtattattcagccttaaataaagaatatccttttgtttatgacagcgtggatgaacctggaggacattatactaaatgaaataagccaggcacagaaagtcaaatactgcgtgatctcacttatgtgtggaatctaaaaaagtcaaactcattgaagtagagagtagaatggtggttaccagaggctgtggatttaggggtggaaaatggggagatgttgatcaaaaggggttaaaaactttagtcaggaggaataagtttttgagactttatgacacaacctggtgaccatagttaataatattatattgtatatttcaaaattgctaaaataacagattttaaatgttcttgctataaaatatgataaatatatgcagtgatagatacgttaaattgctcgatataatcattccacagtgtatacatatatcagaacatacatgtaccccataaatgtatataattatttgtcaaagcaaaataaaattaaaaataaaatgttttaaaacttttgtaaaataaactttataataataatatatttttaatgaatcatagagctaaatatattaataagaactaaaactttaaaactcttctaagaaaatgtaggaatacaatggattatgcagtgttttcttagatatgacaccaaaagcaaaagtaaccgaaaaatacacaatttggactttaacaaaattaaaacttttgtactgcaagcaatattgtaaagaaagggaaaagacaatcctcagaatgggtaaaaatatttgtaaatcatatatttgataagatacttgtatcaagaatatataaaaactcataattcaacaacaaaaaggataaatgacttaattacaagtgaagaaacagtttgaataggcatttctccaaagtagatgtatagatctccataagcacatgaaaagatggttaacatcattgattgtttaaaaaatgcaaatgaaaaccacaaggagatagtactttttacccactaggatggctaatacaaaaaatacagacaataacaagtgttgagaagatgaagaatgcttggaattttcacattactggtggaaatgtaaaatggtgaaacaactttgaaaacagtttggaagttcctggaaatatttttttaatttttaatttttgtgggtacacagtaggtatatatatttatgggatacaggaaatattttgatataggcatacaatgtgtaacagtcacattggggtacctggcctatccctcacctcaagcaattatcttttctgttacaaacgacaatctaataataatcagttatttttaaattcacaataaattttttgactgtagtcatcctcttgtgctatcaaatactagatcttattcattctatcaaactatatttttgtattataaatttcactacccattagccatccccccctttccccctaccactacccttcccagtctcctggaaatattaaacatgaagctaccatatgacaaaaccattctactcccaggtgtatgctgaacagaaataaaaatacatatgtacacagaaaacctttatacagatgttcatagcagcattatttataatagccaaaaagtagaaccaacccaaatgtccatcagctaatgaataaattttaaaatgtcctctacatccaaaaatggaatattatttagcaataaaaagaaatgaaatactgatatgcactgtaacatgagtgaacctcaaaaatatgctaagtgatggaatccagtcacaaaagaccccaaattgtatcaatacattcatataaaacatccagtaaagactgaaggaggaggagaatagacaatagaaagggactgttaattggtatgggtttcattgggggcaaataaaatgttctcaaattagatcataataatggttgcacaaccctgaatacattaagaaccagaaaattatgcactttaagtgggagaattttatggtatgttaaaaagtatatctgcatgtcattgactacagatcttttcttattttttcaagttttatgaacacagttttagaaacatagtctccatttttctctttcatgaagctgcttgccagctatagaaatgaaaaaatagccatgtctgtggaacataactgctacctagatgggagcctccatcacacaatggatagggagctattttcttttatggtcaagataggcaggttctgtcctatagaatatattctgagatgttacctgtagttcagaaaaacagggatattgttgttctaaacatttcctcaacatttatgtggcttcctatttattaataagagaacctgttctttatgtgtcattatactagtttattctagccctggtcctggtccaggactgtctggaggtattagaattgccctactctatgtgaaataaggtcatatctgaataggtatgtcagtcagcataggctaagctacagtaataagcaacctcaaatctagaggcttaatagtctatattttactcatgttacatgttcgttgtagactgatgagagcattctacttagcttagtcactcggggaccatggctgatggtatctccatcttggtacattctttcatgatcatagaggcaaggaacatggttcttgagccttctgcctggaagtgaccagtagacaaaaccagtcacatggccattcctgagttcaatgggaatgccgatgtataatcttctggcgtgaaaaggcactggatatttgagaacaataatgcagtctaccacaatatgctcatggggtctgaaaaggagctgaaaaaacgccattttctggggttctgtcctctggcattgtttctggaatcgtttccacccatccatttctacaccctctcaactgacttttctcagatgcctggggtagctgggtgatttgttaattacagtattgcttaagccttttaataaagtcagcaaattaaagagagagcccagataaagagaatgctttcaaaaatgtcataatgaaattaaggtaacgaagcacttggagacctctcctcccttctttttgtatgaaacttattccaaagcagctggaagagaaatggggcctgaaagtaaagaggggaaaaatatattgtatgccattagtttaattataaaaattcattacatgaagccatgtaagacagaaaataatggaactctaatgggttggccgataacacatttactagtctgctctcagcttgtagtcattgttgaaaggacagaaaagtaacgacgttggtatgtagtcttcaaagctattgtaaagattaatcattttcagtaagccggaaaatgagggccattttcttaaatagtatgccctgtatagagtgttaccttctgaaacagagttgtttggtaatgtcagaggtttaatagatgagtcttgaagttaatggtgagaggctttacttttgaaatggctttcttacagctattttaacatttctattataaatccataaagaggttttataggtcgttttaattcacacaaggagggaagaaattgtgcttctcttttcccaataaggatttatagaacattaattcattcttgggaccaaattgtttagtgattttcaaaaataaactatgtatttttctgctgtctttttttcagaaatgccttactttattatacataataattttccagtcatgctataatcatcaagattgttttatattcttcaaagctcagttaaaataaacccagtccttttccttaaatttctttatatggatgcataacttctttaactgaattgaaatgaaacctgaattgagagtccagaaacctgcatttttatgatgactctttcactgactagctatgtcaccttgaacaagtcacttaacctttcagagcatttatattctcatgtggacaattatggaattgctcaaaaaggaagaagatatcaaaagatgaaagtgaatatgtaggtaggggtcatatattcgagggccttgtaatccaaagagagaggttaggactttgtcttgcaggtaatagcaaaccattgaaaggttttacacagaggagaaatgaggttctatttgcattacaaaaagatcatttacgcagttgtatgtaggtggaagggtggtttgagagtggagggagggagccaataaaaaagattattttagtacctgagcaagagatgatagggacgtaaattaaggtagtgtcaatggaagtagaagatttggataaaagttaaaaaaaaaaaaaaaaaaacttatgatacaactacccagggagtatgttccctgcctcctgctccagttgaggaccaacatatcagattgatccagagacagaattttggagaacattaatatttaaaggacaggcaaaaaaaaaaaaaaaaaagcttgaacactcagagaatacagaggcgaccaaaagagtggaagccaagaaagcagagaacttcgagaagagaatagtcagcagcaccagttgctgcaaataaatcaagtaaataagaacttaaatctttccataggcattggcttttggtaactgaatcagttaactattttcacaaatgtgagtggcatatagcaataagcccatattgcctttcatgaattttcagcttgggtggggtggcacttcttcatgttgcaggttgattggggtcgctctgctccatatgtcactcattctcctcctgagatgagtaggctagtccagagcatgtttgtcttaaggtaatggtgaagtgcaaaagggatagccacactgcataaatacatttcaagcctctgcttgtgttacttctagtaatatcccactgggattaggcaaagcaaggcgcatgaccaagctcaatgtcaagggcatgctgtctttcgtaggaagaatttcagagttacttagcaaagggcatggatacagggagaggtaaagaattggggccagtaattcaatttgccatagtgacttctgtcagaatagttttagtggaacgatgatggcagaagcctgattttcatgaattggagagtggcacgaatgtagtcaagttgagataatgagtgaatatctgccttctaaagagtgtgactgtgaaaggaaagaaaatgatagagtgcagattattgttgttgttgttgtttaaagatgagagagacactcatgtttgaagtctctagagaaggtccccgcagagaggcaagaagttggaacacacaaagagagagggagtatgtggaggaggatcccagaatagatgggtgcccagatggtgaaatcaacttccaatagcagaaaagtcgcctcttcctctgagactagagagaaggatgcaagatgtaaagtctgatatttcatgaaatgtatgtttgatatattaaatttccccctgtggaattgtaggtaggatcatttactgtgagatttctttcagttcgtgttgtcaggaattagtctgtaaaccacattcgatatttcaaacagaggaaattcaatacagaggactggctcctccataggaatgaaggagctgacaaacccaacagaggacagtgaggcaacccagagtttagcaacttcaggaaactattaccacctcaagggctggggaaccgacaagttttaccaaagcccagaaaccagaaccatcgggtgctaattcacccaatgtaaggtctgcacagcaggtaatggaattacagagggagcagccgtccagtgggaaacggagacaaaggagatactgccaagacagagagagaagggggataattatcttgtttcaccctttctcatgctcttctgtctcccactagtgtgtctcatgacttaacctagttagaagccagctagcaagaaatcccaggaaattctgacctcctatgggagttagtacatctcaatactgagtggagtaggaaatgggtagagaatggatctaagagcaaacgacctcttggtggttagctaacagagttaaatttttccatgaatcccttggttcatgaatgtaaatacaggatccaaggaaaaataacaaatccaacatgtagaactttttgttcataagcatattaggatcctgttttacaattttccgagcaattgcttgattttgacacttcaggacaagccggaggcatggtcagagcaagtaaccccatcctagtttacagatgacaaaactgggacttacaaggttaatgacttccttaagatcaaactgcagaacaatggacaagcaaaacttcctgggaagatgtcctttcgttactctgcactgcctttcttgaagttcctttgagacacagtcattaaaaatttaagtaatagttcacccggaacaaacatttattttacttgtaggtgaatatcacaaaacacattttaaaaggaaatttaaccaatattcaaccttaaaattttaatgatagagctatgcacttgcttttatcttccaagttaaagggagaattttagagttgcagcatttctagacaatgtccataaaacagcgagctacttgctttgcattcagaaggggctcacactgtggggaatatagtttgactcattaaaattagtagtagatgtgctagcagtagtaatgatgatgatgatgctgatgctgatgatgattaatatttatttaatccttcgggcacgccaggcacctttgtaaatgttctccctgaattctctaagttaacccacctaatcatatttccacataaatactgttaatattcccatttagcaaaggaggaaactgaggcacagaaaagataattaactctcccatttgccactaagcgatcacgccaggattcaaacccagcaggctcattgtattgctcaggcttttagctactctttctcttcctcctctcttttctaccatgtagggtcaatatcactaaaataagttcttacacataaaagaaatgagagaagacaaacaattaaagtagaaaaaaatactcaaaattcttgaaattaattcaggttgtctcatagtccacaatcactttttctacctaagatactgtgaatatatatcaagcacatagtgcagtagcagcataatgggtttgaatgtgaaacatttctttcctggttggggaaacaatcttttggggatttagcattttatattcttcatagaaaacacacacacatacacacacacacacatacacacacacacatatacaaaggcaatctttttttataagctagtgctcacagtattttaaatttcttcacacaccatgatcaccacacaagcaattccctgtggtgtacaccattgtcaatggaattcagaaagagaaaagggtgtgtgtgaagtctgttgtatttttgaatttacactccttctgaggtctggagttatcccagtagtaaatttcacagcagtaggcaaagctggtcaaggtcatggttcctagtgtgaatgacacttgggtaaaacccaaggtgggcgggcagaatattaccgtaggagaaagggaaaacattctgtgtggggaatgtctttaagaagggagaaaaaaaaaaaaggctacctttgagaacctttgtgtttatataagggcctgagccccctcaatgtcagtcaaggtcagtgggagttttactttttaatcctacatcctcacaaaacctgggcagtattcagtgagggttagcactcagtcaagatttccttaggtataacagtcctaactttcgctgtgaatacaattttgcagaaaaatatatggcacgcgtatttctacctttcaagcattaaagtacatcaaaaagttctggtttgacgtcaagcctcactctttactaccttgtttagtaggaaatctgtcatttaactctagcttactatttctttcagagattttggaaaattctaggatatgttataatttataattttaggcatttttatgatctattgattatgtttttagattcattggcaccttctgcattttatgttttttaattttaacagctttattgaagtgtaattgatatacaaaaactgcataaaattatatgggctagaacatgtgcatatacccatgaaaccatccaaatggtataacctcttatatctagacttttcaaacaggaacctatgagtgatgggtggcttccaaggttatttaacttgcttgagtaaaataaatgattttaattatatatttactaaaaattttgtttttattttgtattcctgagcttttacatatatgctctgatactggtccatcataagtattttattaacaattcagtgttttataaaaggaattcatttgaaaaaaaggtaaccaagttattggtctcagttttgtggatgttcatgctattaattagcaatttaatagatgagagataataagctcttcttttaaaatgcaaatagcaccctctggatactaagggccaattacatgttctttcgtatcttggaatacatttcttttatcactttaggtttggcttaagtgaggaggagaaagaaagaagtggtaattttgtaccctaggatatttctagaaaaggcaagcctttggcagaagttccctcagaagggctttcaaatagtgcgaggatctgaaaagtggagaatagaaactgtaatgcttgataaaaggagtatggaagaaaaggcaggcattccacgcggataaatgttaattgttttgtaatagcagcaactatgctctgtgcctttagacactgtcctctgctttcatagcaaaagtcagtgatattggcattagcttcttgataatagtttggtaatctgggtctatttgctatatgcagtaaatactattacttggtttgattctaggatgttttagttaactgagaaattacattatatatagattgtatatgttcaataggagttcaccaaacacgctgaaattatgctaagaacactgtttgatttttattctgtaaatatcatactaacgcaaaagaacaaatattaaaacaaaaatgatttttctcctcagaagcattattttcaatttcttccatttcgtgttcagctcatgattatgtattcttagagataaacacagtgtagttaaaaattgtgttctgttttttacacaagaaaattgtgctctttttacagtgattactgtgcacatttgctacatattggaccattggaatgatgtattatgttcttttaatgtccctgcattaaacatcgacattgtttctctttttttttttttttttttttttttttttccgagatggagtctcactctgtcgcccaggctggagtgcagtggcgtgatcttggctcactgcaacttccatctcctgggttcaagcaattctctgcctcagcctcccgagtagctgggattacaggagcctaccagcacacccggctaatttttatatttttagtagagacggtgtttcaccatcttggccagactggtcttgaactcctgacctcgtgatccacccgccttggcctccctaagtgctgggattacaggcatgagccaccgcacccggcctgtttctcatttttttactgctttggttaatgaagattttaagtcatatagtatattgatcttcttttgaagattttatcaggataaagtaccaaaagtgagattattgagtcaatgggaataagcatttgtatgtcacttggtatctattgccaaattgtcctaatagataacggtccccagcagtaatacgtgaatgtgctagttttactggtcttttcagctttggattttattttttgttaatttaattggtgtccaattgtaccttttcaatttaatactctattttttattacttgaaagttaacttttttctttttaaataaaatcatcccactctttctcttgtttgaactacctgttcctattcctgtgtccatttatcaatgacttaacccatcctattgaatttgatataactatcttaacaattagtattatcttaatgcttagaagcctcctctctgcacttgcagaaatgtttaatagaaatttcaggttgatatgcttcgagataaaacctaccattaattgacttctttctttgaaatatgtttcaagtgatgagatagcaagtttgaaaacactgaattgccaaagacaaacaacgaagaaaatgtaggtgatttggtttagtaagattcttatattttgactttttttctaattttaaagtaaggtattctaaaagtattttgatccttcaaaaaattcgtgactagaataacagtactattcttttgttgttcaatattttctgtatgcaggtttagttgaacgccagtagatggcactaattacataaacaattcaacaagttaatgaagagggaaagaaatgtatgaggtttttttcgttcaaatgttgttatatgtcacatattcaacaattatatatgagcttatttttgtagtttttttctcttgtgataaaaacaattaagcccactttattgccaattaattgctactaagttgaaatacttgatactggttattgctcaagatgctgcatttgaaaagtttgtcctgaaaggtgggttaccttatactgtcatgattgactaaatcatatggtaggttaaaagcaatctaatatatgtattctgacctgaggattcagaagctgtttacgaagtattttaagacactccaactagagatttcataaaaaaaactgacattcattctctttctcataaaaatctatagcagttggccaaagacctccgccagtggcagacaaatgtagatgtggcaaatgacttggccctgaaacttctccgggattattctgcagatgataccagaaaagtccacatgataacagagaatatcaatgcctcttggagaagcattcataaaaggtatgaattacattatttctaaaactactgttggctgtaataatggggtggtgaaactggatggaccatgaggatttgtttttccaatccagctaaactggagcttgggagggttcaagacgataaataccaactaaactcacggacttggctcagacttctattttaaaaacgaggaacataagatctcatttgcccgctgtcacaaaagtagtgacataaccaagagattaaacaaaaagcaaaatactgatttatagctagaagagccatttatcagtctactttgataactctatccaaaggaatatctttctatctcatcatggcgcacactgccttacctgttatctgataaataagtcactttgggattcatgatagagttatagctgtacatggtctcatcctagtatctcactccacacacccaatgggaaaatttgtggagggcaatatgactcgtcacttcatttcccattatatatgaatggaaattaacagcgcttatagacagtatctcctcaaactaagccttgtatccttattatacctctcttgatctctagtgcttttttcactagcatttattccaatcataaataaaaatataaattatgtaactaattgttaaatatttgtcctttaaattaatctaaatgccatgagggcagagattttgtctttctcatttgatacatccccaggtcctgaaccacgtgatataatagggagctagtaaatgttttttgaatgatgactccctttgcagaatgtacaattaccttgtgcaagctgaaaaaatagcacctgtacaatatgaggaagaccacggtgaaaaataattgagttccaaaatatgacatcaattactgaaaaaataagctcggtgatttttaacaagaagtaaaagtcaccactggggccaaaacagattttgaactaagagtaggaagtcttaggagaaatgagataatgatatatggaaattaagcggccaactaaattttgaaactgagctagacattagagagtaaaaactcctgtgaagctgaatttaagctggtcaccctggggaatagagcaactctaatcctgaattccagacagtaggtgtatagatggaaaagaccatggaaaagaagattcaacctaaagttgggaagttttaattggagccctatgaaaaagaccctggtggagaaagggcaaacttgaatatggagctgatatttggaaaaattctcatagtaactactttttctcaatggcaaggcttggactttcttctcaaaatacagatcttatatgtgttcaattaaacagggacagattaggttcaggaagaattattcacatggaatcaattggtatcagagagtcaaccattagatcttagtgggaaatatctgcttctcaaagagaagtcttttggggaaagcaaattaaagtcagagattaatttgatgagtttaggtaatataaactaaggggccaagaaaaaagcttgctcatggtatgaaactagagcttgaggacactgatctagtctatctatactactctttctgacagacccctctcttcattctcatgctccttgatggcccaagccactctctcagttttttaaaaaattgttttatcaaggtctctggattcttcatgggaatgacttccagtttatattttttggcttggttccaaaaagctatcagctaaggaatgcatatacttacttcccctatgggtaaagtaaatgagaattttagaagccaactcacatttttagcctgtacagaatctgcaattcaccaagctacttctgactcatgtctataaagttcttccctgttcttttctcacttcacatgtactctttgcaagaattcatccacttgtgtagtttcagtctgttgatgactacccatctataattccagctgagaatgatcttttgagttttagacatgtagatcctgctgctttctttcgatgttaatgtcccacaggaacttcacattgaagaggtccaaagctaaactcatctttgccttcttccaatctctttctccaaatgcaacctacttctgttgtccttgtcttagtccttttcgtgcttccgtaacaaaataccacagactgggtaatttataatgaacagggatttgttggctcatagttctggaggctgcgaagtccaagatcaaggggctggaatctggtaagggccttcttgttgtgtcatgattccatgatggaaggtggaagaccaaaagagagaaaaaatggggccaaacttgtccttatatgaaactcactcccacaataatgatgctaatccgttcatgaaggcagagccttcatgtcctaatcacctcttcaaggtcacatttactactgttgcaatggcaattaaattttaccataagtttgggaagggaaaaacattaaaccatagcattctgcccccttttccccaaaattcttgttcttctcaaagacaaaatacattcatttcatccccaaagccccaaaaatcttatttcagcataaactcaaaagtgcaatctaatataaattagatatgggtgagactcaaggcacaattcatcgtgaggcaaattcccttccatctctgagcctgcaaaatcgaatcaagttcatcccctcaccccctacccttcccagcatcaggtaaccaccaatcacagaaagttttactgatagtcctgctctagatcatctttgtctatgttcactttagctatttatcctagtgttccattattggaatactaagcatgtgggaattatttatattctactgttcaaggtcctcaccaaggtctgattgcaaaaattcaaaaaattgcaaccttaggcataaatgggttaagcagtttagggtacatttataataattatttactgtgctacttcaaaaatcttattgcctctatttataaataaaaagtgttgtctctacacagtggcttgttgtaatgcatttacttgtttctgcctgattttttctatttatacattttcttttttatttttatttttattttttcacttttaagttcaggggtacatgtgcaggtttgttacataggtaaacttgtgtcatgggggtctgttgtacagattatttcatcacctaggtattaatcctggtacccgttagttgactttcctgatcctctcgctcctcccaccctccacactctaatagtccctagcatgtgttgttcccctctacgtgtccatgtgttctcatcatttagctcccacttataaatgagaacatggggtatttggttttttgttcctgtattagtttgataaggacaatggcctccagatccatctatgtccctgcaaaggacatgatctcattctttttttatggctacgtagtattccatggtatttgtgttggtctcaaaaactacaactatgacaggatggcattttcacttttgttgttatattaaactcatcttaaaaaggaaagattaataatgtcaatatttgggttatggagaaaaagtatctcatatctttgaaaaagttctgtaactatagctttttaggtaggagggattctgtggaaagttttctgattacatcatttctcacagttcaggttagacaccattttactatgaaacactaatgcattgcctgcactgagactttcagtcacatggagaaacctaggcaaaatttttgtacacttggaagaatatttaaattagtaataaaatctttagttttaaactgttgaatgttaaataagatataaaatgtacttgaaagaaatttgctttgatatcagacactgccatgttgcagtttcaagacataataaaaaagtaaactaatgtttatattttgctgtttaagtttattaatacatcagatgagtcttcaaattctacagtggcttttgatatgatcatttttacttgccattttatatagaataaatataaataggcatttatgcttaaaaggaactaatctatctatggaaaaaagagaaggctgcttctcaactaaattgtacagtttagaaacccagatctgaacatagattattgttgtgacctatgtaggaaaatatgttgttttccttatcgtagtccttacagagtccatgataacatataaagccagaaatgtgagcctctgcaagttcatttctttgtcttcaatctctgtgaatagatatgagtttgtgaataagataatattagatgtgatattacaaattattgtgagaagcctctaaggattagatttcaaggactgccatctggctgatgactttatgatgacactgtcatgagatttcatttccttatttctgttccaggatcactctttaaacaagaaataagcattaactctgaattgtctgcttgtagctgtatgagggcttccacaactgccaactagccaggtacaaactcatcaagcagaggagatggtccttgcatcagagggttaaacatgcctagaagttccttagctaagctcccagatactaaaaaatccctctaggttctaagaaagattcagcatgtacatgtgtgtacatgtatgtgtgtacatatatacatatacgtgtatatgcatatgcatgcatatacatacaaacacattttcttccataacatctcagtattctctgttctttataatactgttttgtattttaatgatcaaaattaatagttgatcatctgaaaacattttgacctgttttctccgtctttgacaaccttgaaggcacttgtaagtcactctttgcttctctattcctaggtcctttctcatcttcattgcaacaagaaaagagaaaacaattgagccctattttgtgtgtagcaaggagctactctagttaaacactagatctcttttacattctccaacatgttgttttagtaattattctactttcctttttttgggatattcaatttcttctttctttttgctcctcccctttagcaggccaacatactcaagtctccctcatcctaagagaacttttttagtatatcattttttttctatccagctgtacttgcttctgcttactatatcatttttaagcagtagttggcattactgtttcctgttctttagctactagttgtactttgacccactccagtctcacttccccagcaccaccactttatgaaaacaaggacttactaagatcatcagtgactttgtaatagctaattagtgtattttaattcgtccatcttcttgactatattttaacattgatcctgttggtcaactctgctaatcaaaactttatcctccttggttcccagaacaatattatcttgaatatctcatttctctaatcatataataattgtgaggtgcttggcacaatgcctagtgcgtagtaagaactcagtaaaatatcatctgccatcgacaccataaaaattaatttacttactcaacaaatacttttgtatgaagtttgtgctaggtaggcccagtaattggtacttggtatagagcaatgaaaagccctaccctcataaagcttatattcttggaagcagaagttggaagacagacattgacaaataaaaattaaatacatgatgtgtcagatggtcatacacacagtgtggaagaacaaagaggaaaacaagtggagagagagagggaggtggaagaggagtgctgccatgaaaatgtggtaatcaaaaaaggtcttactgaaaaggtggcatttaagcaaattctaaaagacctgaggatgtgggccatatgtataattgggggggaaaaagtagtccaggagagtcctaataagttaaaatgccccaaagcaggaatattcttggcatgttgaaggaaccttaaaagggagatcagttaggcagaaaaggatcaagcgagcaggaaggtagttgacaataaatttagaggggtaactggcatctgattatattggccttttaggcctgtggactttagcttttaatctgaatgagatgggagttattggagggttttgaatggaggagtgacatgttttgtcttatctggctcctctgttacaatagactaaacagaagtagtgagaccattaggaaactgttgtcataattcagtcaagagatgactgtggctgggatcagaatgggagaggtgaatgtggtgaggagtggttggattctactatattttgggtacagagcacaacagattttataatggaataaatttaggtgtgagagaaagagtcaagaagactcaagaatttttagcctgagcaacggaaagatggggtcatcatttactgagatggggaaggctccaggagtaacatattttgggaggaagatgtggatatgttacatttgaaatgcctattatacatctaggagatgtgtggagtagatagctggatatatgaatcttaagttatggggagtagctcaagatacaaagttgggagttgtaacaatgatcagtgcaagttctctgtcttcaatgcaattttaaatgttgatgttccattcttaattgtctctcttctttctctctgcacattttgagtagctttgtctgttggcttcagttaacattaagactcctcagtgtcaacttccatcttacactcttctcctgatctccagaactgtactttctgccacctaacctacattaccacctggatatgctacaggctgcaaaatgtgtcaagtagaatgcattatcttgcccctaaaagaaagttaaattttctgtgttttcagtgtagtgtaattgtctaacttaattgtctctaaaactggaaacctaagaattaccttctacctttctcttgatctctctttcccaatctactgacacatgtattaaactggcttccaaattctgtgaattctacttcaaaaattgctctagaaacaattccctctctttatccctattgtcacctcatcctaaagcctcttcatcctttgtagatttctgggagattgtaaccaacttttctctattctgccagttatcaagtctttacgctcatttgacattcacaacagccttggatctgtcttccttgaaatgaatcttcttgcttccctttgattccagtgctttttttttaccctcctgagacttgatgcatgatatttacatgtatgacatgtttccaaaagcattctcaaatttttctgaaagtaaaaacaaatgaaaaagtaaaacattttcctgggaagaaaagcaaatagtgttatacatttttgcttgttcatttgtttgtttatttaggagagggacaagcattagaacttcataagagtcttatatgctgtatctacaaataccgtcccttggcaatataattttagagttccttttctggaactacttaaggactgttttatgatcctcagcagactgttatattattttatagccataccttttatttgctgagtaattgtactcaataattgtttgtaattgaatgaaacaattcatcagatgttgggcactgaatggctttggattatttccaaaaatttaaaggataaagatttgctgccttcaaagctatgtacaaaaatatgatagaatgctagcgggatatttgtttaaaatacaacctttattacattggggcctgctcataatatatatgtggcacattttatttaaaatattaaagttcctggtgggacatgtccccataatcccagcactttgggaggccgaggtgggggtgggaggatcactagaggccaagagtttgagaccagcctgggcaacatagtgagataccatttctacaaaacataaaaaaaaaaaaaaaaaagccaagtttgtagtcccagctacttgggaagctgaggcaagaggatttcttgaacctaggagttcagttcaaggctgcagtgagctatgatcatgccagtgtactccagcctgggtgacgtagtgagactccatctcttaaaattaaattaaatttaaagctacaaatgaccccaaagccaccagttcaaccctctcaattttgaataccctattttaaattcctcttatgcgaaatgtaccttgtagtccattttaaggactgagaggatttggtatgttaaaaaattcaatccattatcaactcctttaggtacacttagcagtatgaaaatgtgtctttcggctcttcaggagagagtcatatgtatagttacaagacaatcccatttttatattgctgagacccaaatcttcccaactgattatgaagcataagaactcttcggaggtttaagtgagctgagattgtgccactgcactacagcctgggcgacagagcaagactttgtctcaaaaaaaaaaaaaaattctctgcattctacagtagggtaatataacatctatgatgtgaaatcttggggctccgggccagagagtgtcatgatccatatggatctaaaaggttcatagtggtaacagcctgcttcattttatgtcatctcctttcaagtaattagaatgtttctagcttgcagggattgcacacaaagggagacatttggaaccatgtcattggtgatttactggtgtggaaaattacctggtgatgtagccaagtagccattttcattctaacccagtcctacagtcctgaactgggctgaaccaacgcaccaaaatatatgcttagaaatgctcctatgtatcagttttcccaggaaaaacaatagtattatcgaaaacttaccattgtttcctaataaaaaattataggataccaacagactgttttttgttcataaatttaatattacagtatcaaatattaaagcaaatgggagaaagtttttcttatttggtttaattgaaccattaatgttagctacaatacccatcatgttacttttcaattatatttatattttcattttatttctatctgtatcattctcagaaagacttctttaaaacattcaataaaaatagaatttaggtagatttatttttagaaagttgagtttttttaataaatgaatataatcatcacttgacttaatttttttctgcacaattctagaaatcttatagttttgggatcctttggctttattcagtatgtaacagggatctgtttcctttctctaaatcattaattcaaatgatttcttatattaaaaatgtttggacatataggtattaatgagttttatgaaatctaatctttccaatttccccctaaaaagggatgtcatttaatcagttctaggttgtgatcaatagcagatttttttttttttttttttttttttttttttttttttttttttttttgcagctccctttcaccccgtagggaaacctgatatcatccttgactaattgcagcaaagagcctggctcaggtcctttgtcttataccgagtgtttatagattcttgagcccagcagaatctgaactcctggctactgctacctacttcccagcccaggccccaaaagccctatgtctgcagccccgtgcaccactgtgtgtttttgtggcatttctgaaacacagagctacttaacttgtttctaagcccagattgtgcctttttgattttctattttggtattttatctaccatttttctgtgtttggatgtttcttctatattttgaaataacttctttcctttagtacaagtgattcttattgtagaaactatcaaaaatttacaaataaagaatcattctcaacattcttagcaattccttctatcatatttttgcaaatatatttttgcctatttttattttacttactccctgtttattaacagttaaaagcattttcagatagttttattttttcatttaaaaaaatcttaccacatttttattaggaaggaaatggacaggtgtttatcttttcaataaaaaacatgggggaaataatttcttgaagtacatagtgacattcttccagccaatgttttatgctgtggtcattccgtctgtcatcagtattcatagaaagagatgaaaattatttaaattaactaggaaatcaattccccattcaaagcagtagttgtgtgtttcaaatatcttctaatagtcagtttcacacttagctttatcaaattcctaattatgatactcattacatcactctgtgtccagtcagtgtgtttatgccacagagcaattaaagcaaatcaggtgaaccaaattcaatcacctttgtagataataacctacgttgcttaaacttatggccgctcatacaattactgatggattgcctttttcttttatattgccagtattttaaatgtcctagtgaagttggggtagctgttgaacttcaactttatcacaacctcttttttaaaatgtgtaaacgaaaaaaccctccatgaaatgaccaaatacagttttcatgctgggacaaattagatgaataataatcataaattcataatgattatttatgattttatgtttttatagtgagatatgttttgttgaaatgtgttatataagtgatacttaagtttcctattaaaatagaaatgctaaaatggcattgttctctttagctgtgagtctagcttttgacctctgcttaaacggaactgttgttccatcccaaatctgcaactctgaggcctatgctcccttcactgctgtctaatggatacctatcaatttggaaggaggtttcaggcagctattcccggtaatctaatctcagctctgtccttttcaatattttcatcagtggcttggatgaagacatagataacattcttatcaaatcaatgccacaaagcagggagaaatagcaaatatagcagacaagagtatcaggagccaaaaagttttcaacaagttggactggtaggctgaatactgaaagatgtaatgtaaatgcaaggtgctacatgtgggttcaaaagaaacatgaaacaaaaaacccatctaacttagactgggctccctggaaatagactaagatagagagttgtgtgcataaggtttgttgaggagtgttcccatgagatacatgtgtaaggttgtaagataggcaagattgcacagacgaagaagtgcagtgaagcctgcagtgcgttgcggcctcatcagattttcaggggagttctggaaattgcatggccctttagagacacgctgaattgaagcaagggatctggacctttgaacccaatactagagagttaatggtcctgggtcaccccatgggaaagagcagactggagtaagattgttacctacagctgaaggcaatttccagggagggaggcagctgtgagctgttagtagtcaatattccaaccagctagggcatgaggtcttggcagagcaacagtgtacccaagaccgcagtgttacccaaagtatggtcctctgactggcagcattggtatcacctatgagctcactagaaatttaaatttgtaggtcctaccccatccaactaaatcagaatctctggggatgggacttggggaacttttaacaagctttcaggcctccaagttatttctatgcatattaaaatttgagaaccactgcctacaccaaccaaaaacattccaaatatggagataacatagagtttttagcaacaataatctccttctgtttcacttctctctttacacacacacacacacacacacacacacaacacacaacacacaatgtgatagaacagtgggaaaggaaagccaaaggggatcttaggccgaataaatttaagcatataacctagtcctaagaacgtatatttcagcttaatagagagaggaatattgttataaagctgtccaaagatggaacaggctgccttgtaaagttgtagaagtattcaggaacaggttggtgataccttggtggttgtatggtataacatcctgatcttcacatactcatcatctagagtgggagttttctttttccaaatggggttttggcagaactagttccactgtatcttaataagtaataactcaagaaagggttctatggatgaaaaaatgattaggtaatatcaagttaaatcaaagcgaacagacttctttcccataggagtaatcagacccttattacagtgcatgcttggtgaatcaacaaagtatgtgtatttatgaaagtatggggggaagggataatctatacagtatgcatcccttctaaaagtttgaccatgaaaacaatttctcaagaatcttatacaacactacagtatctggtccaatactatgcatagaacatgcactcagtaagtgtttgtaagatagatagcatagcatataggccaggccactgaagggaaatcatctcaccgtgagttacctgaatagtattctctagtgccattagctcaattcttcacgtaggcataagcctatacatttgccatgctaaccaagggaatttgtgttacgtgaattttgactctattcagacatttttttctatgactcctccaaggctgttattcttacctcatattctggtagaagtttaaggacttttttctgggaatattgattaattagctagctagctagagacagagagaggatagagattgattctctggcagagcctatttgaatcatattgaatctttttttttcctgagacttcccacaaggaggatggaggagaaattttttagaaatccaccgaagtaatcagggatatcttcagtaaaagaagctatacttaataaagtctctattttagcagatggcaatcaacaatagaggcaatagacaatagagtctattaaaattgctgggatctgctaataacgtttttcttttccctgaaacaaatgccattaaccctccttgacactctgtcttcatcaacattctaatagaatggaagtaactcataattttgaggatttttttcccacacaaaacctataaaccacaccacgctagtgattacttttagcctagttgctaggttgctgctggtaacagtaaaacttatcctgacaggtaggcaattccagaagcccagccaagcacttggtgtgtgtgagtaaacccccatacacttctcatgtagagtaaccctggccaacccataactcttagcaactattcctggtggacggacctggtctactctaagaagaggccaaggttctttaatagtgcagttgcaagaaccagaattgaaagtcaaagttctagcaagattttgcagactccttggcaaaccagtggcttgggactcattcttgacttcaagcccttaattgataatggtaggacagcttgcttgcgctgggttctgctccctgggatatgcactgtttgccaaatgagtagcaggtggacagacatctttacaatttgctgtcccatattctaaatgaacgtgacattctataggtctgagttaacctatgaagtcaccaatttcaatatcaaaatatttatgacagagaaaaggatactgaggcacagagagtctgtgactttcctaagctcaaaacaccagtttgtgttaattctgacacagaaattcttgtatttgctatcagtctcctttttctgtgtgtgtgtgtgtttttacattgcagcatcacctatatgatgttaggttctgtaactttttgagaattttctcacatacagtgatgtgttactttttgatatttcaaatagttctagtaagtcttttctacttttattagcgtattaacatactggctctaagagggcatctcaccacatctttgccattcttcctggaaaggcaagtttctctccatcttcttttttgtattccaaagttttgccaaagtttgcttttgaaaatgggttacctggcagagctttattattctaactttgaaagtacaagtcagaatcagacagtggcagttatatatgcactactgtgattactatataatgaaagtatctatggtgaaaatactgatactgacatatatttgccattttctaattaagtgcttcagtaaaaattaagcactcactctttgccagatactgcaatagatattgagcacattgaacaaaattctccatatacatatatatgagtccacattctatgaaagtataatgtttttctgagaaaaggcataatattctattaatatcagcttttgcttcttccaccatatattgaaagaattctgaatactgttataatttaatgggagaatctagagaattctgtatttgctttcactgcattgatgaactaagatttttaaaaaatgtattcttcatagaactacttttccatatttacctaatattattcttatatcatttgagcacatatttcactaacaaaacaaatgtgcaatgttattagttctaacatcaaaattacactgatactttaatttttatcctattatttttcatgcagattaaaataattatagctacatcacatgttgcaagttttaagagctactttaaaaatatatgcttcaggaaagacatgattagatggggaaatggatgatgttcatattttcaaatgaaaagttttaaaaaagtgcctatcacaaacactaaatttttacataaattatcaactactaatatatctacaagaaataccatttttccctacaaaaactcttaacaataattgttaaacttagtcctggaacctgctaatataatcggacaaatgttgtcaataagaaggtgaaaaagaaagcatatatagtttatcaaactataaaatatagtttatcaaaaccaatttttcctattgacatttattcaggaaggaaaatggatgagtgaaatgaacaatggtctctaagagaggtgggagatagcaataaattcagaccacgtttcctgtcattacagcagggaagtaaaagagctacagtcaactctcgaaagtacttgggggaactaatgattccctgtagacctgtgatgtttttgaaatttaattcaacaatttgatatacaccgcaaagcgaacagatagtcagatcaaaatcggaagaacgattgtctgaatggcatccatttttcctagatgtgctgtcccatcctgtgtcaattaaactttcaggtgatcttcaaacatatttccaagtaaaaggtattgcagttatcctataaactggcctcttccccagcactgcttttgctgtggtcaactttatttctttgggctcacaaaactgatagagcaaaataaggaaaacggaacattggattaaaataaattaattcccattctgtgactcactaaaaaaaaaatgataactatgcttctgtgagcattaataaggaaatgaataaggaaatgaccaaattgttcagtggacaacttgtatgggatttttaagtattgtgtcatcatcaatgttgtcaattagcatatactttgaaatcaactaaagcaaatcagttgactaatcattaagggtctttttaaatgacaacatctaaacagcaaatgttttattttggaaaatcatgacagcacaagaatgagccagatgttttacaacatgatatccataatttaaagtatgtagtagtcactcaaaggatttctatttcagtttccttatgatttggctaagctagaatttggaaaaacactttaaggtaatgtgagaaacagcaaaattcaacatgtggattttttcactaaagcttatttctgattattttttacaaactttactaggtatatgttaacttcatgacacttatagcagtggaccgtagttttaataaaatgtgaatgtatactcttttctcaataatattaaagaatgttgactttcgtgaggatatttttatttttctcaacattaagaactgtcaaagatttaattctacaacagaagacgtgaattttgttttctaaaggagaacagaatctatagaagaagtgttgctcatagtactcagattgttgaccaatcttaaaggagaaaccgtcaattaatttaccgagaagtaataacattatctttttcttcaattatgcacatccacaaagatttggggcaaaatccacttaaatgatattatacataatagatgagtattcatatgttgtaagagtcctggcttctttcctgcaaaatgattaaaacttggatcagaaaccaattaaaaatccattctaattcccaaatgtatgtaactgtactataagaaaaataaatatttcttcttgagggatatccattagttaaggatattcataacatggtgtcttgtaggaaatgttaatctttgggtgaatagggatgtttgggaataacaagactcaaagagatgttgcacttactcacttttctctgagttgttatttctgtcatttccccagtgcgcctgtcctcaactttgcctctctccttattcctttttttttttttttttttttgagacggagtctcgctctcttgcccaggctgtagtgcagtggtgcgatcttggctcactgcaacctctccctcctgggttcaagcaattctctgtctcagcctcccgagtggctgggattacaggcacccaccaccacgccctgctaattttttttgtatttttagtagagacagggtttcaccatcttggccaggctggtcttgaactcctgacctcgtgatccacccaccttggcctcccaaagtgctgggattacaggcgtgagccaccatggccgatccctccttatttctttttatctctacctctgcctcaatggtatttctctattactgttagcatttgctttctgtgagctcttgcacactgtcagcttatatacatgttcctgttcacatgttttcctgtccccagtggttacaacatgtcttctatctcagcccactctagaattgtcttacttttccaggtctcctgctcctcagtatttttcccacttttctagattcatgttttcccatctgcatatttctcttccatgtctgcactgtcatccgcttagaagacagcgcataaggacactgttatctgagcaaatcttcagcacagccaccatgaagcatggttaccttgtcactttccatttttcccatagtgtgtgcaaactgccctgatctgcatagaaaggtatcataattgaggaaacaaaatgcacaaaaatgtccttggttattccacccctcagaaatataggagagaagtaatttacagaattacacagaataacgctatgtcacatggacatggagttatcgggttagcatataattggaaaatatttcctaggaccttgacatttactcactttttgttttcaaattacatgtccctatctattagttgcaaattattttaatgcaccgtttaccaaagaaaggctgtttcttctgaaagctttcatttgacaagtaacttgtaaaaatattcacattgtgtatctgttttccccttctagtccaaactctagttatcttaaactttgcgcagttataaaaaatcataacaaaaaaagcttcctcgttgtcattcttgtcaaaacaggtttaccagacttaggtaaacttaaaatagttagtgtaaaagttaaaaagctgatttgctccttccagcgtgtttgttgcctttttgccacagcaaaattgtaaatgtaaacgtattccctaggagatgagctgggctgcaattttcagctaattgggagaagcagccctgagttgagcactgtcaggctgatttgagtcttaagatatgatgatgattattgtgtcaaatgtaatcaagaacgtgggctctgaactgactcaagggctggctgtttttaattcaggttcgtatatgaagtagacctccggttcaccgatagtcacagctggttgtagaagagagcaatttttaaaatgctatttcattctctatggagctctagggatcagagattggatgcacagggaggggacacatcctcattctctcctgaaaaattctattaattttcagtataataaactttctcttgagattccccagtggctctgtatcggtggttttcaaacttctcagacccaatgccacccctcttttcttttttaaataacaaatactttgtaataccttctttacgattataagccaaaatatgtagacaacataccctacttatacaggcaatagtttaaatgatgccgtaactctattttaaagagaaataagagtcatttataataaaataatatgtgttgtagtatgcagttattcaggcaggatcacactggaacacaagtgaagtttttagatcacgagactatcaatgcagtataaacaaatgcagaatgacaccattgtgttgtatggagactcaaataccatgaggggcattggtcatccatagcgtaattttccaaaatgctgaacaactcttggcaaaattcctaacaccatgaaataaattttttcttggatcgttatggcagttagttgcatggctgaaaaattcaatgtcttaaaatcatgaggaaaatatcttatgtttacgtgtaaaattgagttacgttccaggtttaggtgtttataaacagggtttccacatacatgcatgtccagtgggatattccaaagtgctgtcagacttgggagagttctttgttgtataagaagtctaccatcttcattccctctccacagaatgctattatagtaacactcttcaatcactgtgatagtcaaatgtcctccctcaatttctaggatgcctcttttttttgtggtctgtataatttggttaaatatctttccagacaaatactgatttgtgaattaatgaaatagcagtattttcggagcacctaacctatttctgagtgatacagttgccatttttacaagactaaatgaaattaccatttcagacctgccagattgtctagcccagtcttttacaattctgtgattatcactgcaattataatctattttcaccacttgaatggcatgatctctataaaagggtggtgataacactcatctattctccttcccctcacatagctatatcaatcgccccctaaccagttgttgataaatgcagttgaattttatgtaaaaattataagagatattattgtagctgtccaagacatttaaaatgctaaatgcaacttacgtggaggctataagagaaatatgaacccatttattgaagagattagctaatttagtaaaacaacacagatatacctgcatacagggataaatccctattgtctaaattattgagataaaataatgttttacaatgaaaaacttttagacaagtaggtaagtaaaatgcagcagtctatttgcatttcatctgggcatttgacaaagtctttcgttatactcttgtgaataagttggagaaatactggctagatgcaagataaattggatggcttagaagccacttcatgattttacgcaaaggatgtcgattaatagaccagtgtcaggtggtgatggaagatctctggtgctatgtcacaagcttctgttctcaaccctgacacactggatgtttttgacagaacatgagtagaactacagagaggaggcccatcaaacttatgggtgataaaaagcagggagggcaggagtattttgggtgacagaagccaaatgggtgtctggacaggatgcgttttaaggcacttttggtacttgatgtctgaagaccaggatcaaacttataggcaatctgaacatttgccaaaataacaggttaattttgacagaagttattatttgtatgctgtctatttctttaatacacctagaaagtattgaaataacattttttgcagacactcattttgaaaattcagaaaaaaaattgttaactttcgtggaagagtaacagaaactcagtcattgacagctaaatacaatgtgttgcccagtaaaatagtccaccccttcactttcatggctaatataaaatttgatgaaagatacaaattccaaagattgaatatctgtacatttgcaaagcaaaacacaattttgggcacagaattgctcattctcatttttaaacatcttggttataactgaacaatagttttttataacaaagataatattttcaaattattatgaggttcaactgaaataatttatgtgaaagcaatgtctaaactctaaaattctatataaatataaattattattcaataaattcacatcaagaaaattttaagttttttaagaacaagagcctatggccttgtttttagaagctgtataccttatcggtagtaggtttattgactttaattaaatttattgagtatctattaaattgccaggaactgtggtgtgaatctttgccctcaaataatttacagtaagttgtggttgatgaatggtgatgacgatgatgaatatccagactatagtaagtggtatattcataagtcagaggattcttaaaaccagatgcaccctcagattcattcctttcatgttgtacttctaattgaaaaaaataaatcctaaattatgactgttctttataaattttaattgatcttataaaaggccatcaatacatttcaaagtatctaggtcttttaaatgcaatttttcaccctggtaattaaaagtacgaaagcaagaaactttaaatctttattttgataagttttaattagctcaagctacttgtaatcccacatcttgtcttgtaaatcatatctgagccattaaaataggtttacaattagaagggcaattcttttagaatctacttaaactaagtcacttcgacaaattaattcatcgttcagttggttttattaaaatgtatttatttcactgtaaaatgtctagtaaagcaatgtatgaagtattttattttcatgttagaaattttatgtaaaagatatcccaaaatacatagacattcagatactctctgtatcattaaccaacatttactaacttatcatttagagaaggccaaaattgtatgtactataactttgtataatttcataagaattaaaatattcgattaatgcctgtaatgccttctttctaaatcaaatcctcaagcttacctcgagttcaaagttcagtatttattgtaacacatctcatagatgacggatgaagatggtaagcaaaggaataataatttcttttctcttttcacacatatatacacacataccccataatcctaattcatataataataacagaaaacaaagggcttttgagaatagtgacatattaatatccattatatttacttcacagggagactggcaagtctaccttgagaggtaatgtcttatagtacagtggactagattgtttcaagatttgtcatttattttggcaactcacccagcttccctgaaagttaagttcctcatctataaactgttcatgataattacaacctgcctcattagcctcatcaagctatttaaaatatgaaaggaggtgctatctgtggatcctgtcaaaggagcttgaaaactgcagaacattattttagtgtaaaatactataacaatacatgttgaatataaaatggctttttcttaacttttattttaagttcaggagcacgtgtgcaggtttgttatataggtaaactcatgtcatgggggtttgttgtaccgattattttgttacccaggtattaagcgtagtacacattagatatttttcttgatcctctccctcctcccaccctccccactccagtaggcttccacgtctgttgttcctctctgtgtccatgtgttctcatcatttagctcccactaataagtgagaacatgcagtatttggttttctgttcctgcattagtttgctaaggacaatggcctgcagctccatccatgatctctgaagaatctccacactggttttcacaatgactgaaataacatacactataaccaacagtttataagcaatgctttttctccagaacctgttatttttgactatttagtgatagccattctgactggtatgtgatggtatctccttgtggttttgatttgcatttctccaatgatcagtgatgttgagctttttttcatatgcttgttggtcgcatgtatgttttcttttaaaaagtgtctgttcatgtgctttgctaaaagggccctttcaaatgtgtattattaaccacaagagagtactgagtaagagactaggtaataaaagtcacaaatatttcgatatcataattcagaatttagatcagcggttatgaaattgttcgtatttccaaattccactgacaggactctactataagtttatttcatctgttgatatgtttttagccacttctttcttttaaagtgaatctgttgtgtgtttgccatttgatattagaaaactgaacctgcctgctttgctgtcttctgaatattatgtatcaacaactaacaagctacagttagttgttttgttctgtttttctctaagttattgtggatgaggatatatataactgcacagtcttatcaggtttgtaagagatgatcttaggctcatcttttaaattggtttttatactattttaaacaaatccttttaggagagaagaaaagctgcttagtctatcaacattaggaaatatatctttaaagagtttatcactgcaagtaaccaaagccaacttaaaaattcgcattatacaaatcattgagaatttatttagaacagaaatgtgtccaactataggtcaacaccaattttaagtgtgtaattatctgggaagtagtgttaactgcatttttttctaaagatcccttacagttgtataaatgcccaaaaggatattttgagtctctgtatattaaccaaaccaaatgtaattcattactcccaacattatatttcaacctctccaaatagtaccttttcgtattgtatcagcagaaaaatataaaatgcagatcttaaagagtatcaatctctttaaaaattcaagaaagaaaaaaatatgtgtgtatagagacgtgtatttcatctgctcataacactgtgtacatttctttatcaactaatttttttcagtgatttatgagttgaaatacaaatcaaatgaaacgggtaatgcaaagtaaagtagaaaacacattttctactgctgtctcctaatgcaggtcttttcaggaaagtactaatggttttagggaaagtgtataattatggttgtttccctaatgataaattcgcaaatctctattttaaaaacattcataaggttaaaaaaatgagagatgaaatgtgtctttcaaaattccttacgtgattgataatgcctatactctcttactatctaaagtctaggtgatatgtatattttttttaaaaaataaaatgtctgtatcagtgaaggaagtttacacagatagcttcaaagctgtggtttatctttggaggattaatctatttctcatgccagtgtgttgctactgcacatgttaaaaagtcatcctgtggtgtctggggtgacaaaagatgggaatgagttttctgagaactaatcagcaatactttgggaacatttaggtcatggtttccaattaactctggagagtttgagtaatttagtaccagacctcaagagagaggggatgaaaacctcgttaattcatatgttggtgaacggcaaaccagcaaatttgcattaaaaatggatttttattttaaagcaaagagcagccagatcttttctgcaatagtttgggtaggagaatatctttgtatgtatgtgttcccttatgtgtaggtatttgtatgtttcaacgaccctgcatatggcaataacagaaaattaaatttgtgctctaaaatgaagaccaggattcagtgacataatcttccttgtgcctttctttcttttagtacaatgaatatatcagagaggagtgtattccaatatctgtcttcagagttacaaaaacttcttttctagaatgcaagacttgggctatacccccagctctgccacttaacttgtatacaaccttgggaacatcattacaattctctcagaatcaatctctccagccctaaaatgaaaccagcaaaagcctgtactgtatatctaaaaggttttttatttttatgaaaattagttaggcaaacttttgttaagcatccatcactctattttgagataaagccttgctggatgatctccacctcttttgatggaaagagtaaaacatgtttaagatacatttatcacttgtttggcaaattgagatagaagtttatgaaagcagattgatatatgttacatttgagctactgggaaggactccagatggtttatagccttaattacattgtaactctagttaaatgtttacctatctgtaccctctgttaaacttgaatatgttaaataccaaagtccatgtattattggattttctgtcaccatcatcaggcacagatcctggtacacaataggtacggaatggatgcatggatgaattattgaattagatgttggtaggcatgtggaaataagaatgaggttcagaattaaagataatctgtatcgagtgtaaagccattggcagagaatgaaatatccagctgagtatacatagaaaaagaaggtaggtagaaaaatggaaaatatcttatgaagtgatgatagaataactctgaatatgtttgaaaacatataaagagttatgtggatgttagctttaaaaattatcttccatgctgtacattagatctgccattcttcatgctgtggatgaaaagcaagcatcagaagttaaattaaaatgatgtcatatattcctcgccttacagtttcataacagaggagaaaagagaaacattctctcattgccaccacccttctccagtcatatttctaggtagatgttgcccaaaaacagataaaaccacagagttggttttgctaggaatggactactaatccaggcaatgttgacagcttttgcttctcattagtgcacgttactaatagaattgctagagattaaaaggaatcctttctacaaagtgctgtatatccataggtgacaaaattctagcttcccctcacaagtacaatataaagttatgttttaaaatcaaaatgcaatttactagcaaactagtaggaactgttatggttacaggaaatttgaatttcagattaactctggttctatgagtagcggttgatatggcaagaatcattttgatcttacatccaggtgctactaaggtctctctgacctatatctcaccaaaaaaaggaacaaaataatgatcctttaatctttctcctaaaatatcataggaaatgatagtggctaaattgcaaataaactaggaaggaaagattcagagtattttatgtgattactctataacaatgccaggccatagtgaaagtgttatttagcagaagactgagttctttgaatgttcctaatttatcacattttaaaaataacctgggcaaaataacctttcatatcagattgagcctttttctaaaaatactcaatatgtttctgtaattatacctacacacttacaattccacagtataatgcaccgataaagtatttttcatccatatatctaatagtagaatggtgtgtatacaataattaagctctttaggcttaccccggaaagcaacaagtttcccttcctttttcctttttatgtattatgttggccataagaaattgatgatattcaactcaatgcagtcttagagatttattcagaaataccatggtgtgtgtgtgtggcgggagtagggttctaatgacaggtcagaacttacttatttgatttcttcattgataatcaggtcttaaaaagaaaatgggtatgctgaaaacatgccttctgtgattctttaccttcatgtgcagttgtctctggataaacactttctttggcacgtatagggttgcactaagctttatagctccaacactccgccccttcagtagattcttgcttgtaactgatgataatgcaaacctgtattatctataggtctccttaaagggcaaccaaaagttcagtagcaattcaggcacaattactgcatgtgagaatcctccatcttgttccctttggagaccacatatatttcttaggcaagtatatttttaaaatccttgttcagcatgacaattcaggaggtcaagttctcccagaaagcagattctgagaaagtgattagcatgaaggaattttattggagagtgctctcaggattaacacctgtgagcggaggaaaggaaagggagcaggattgggcagaaggagaagctgggctaccatacagtcacaactacaacacaatcaaccctccgcctctccttcctagccttccccaggaggatctctgaagtctgaaggtagaatagcccttcagaattgtcctgagttgcagcaagggacccaggattttataccccacaactctcccatcaaccaatacgtgcagcccgtctcggggacatagtgggtaactttgggctaggcacctctctttagctgagtccagctctcagacaggaataacagctgaggactgtcagccagtagcactaccagcagctggggtcagaagtatttcagtcctgaaaaggggtccgggcagcccagcttagcatctactatgccagtcgttctcaaatctggttcctggcaactgtgattctcaagctttagcatatattggaaggcttgttaaaacacagcttgccggattttacccacagagtctctgattcagtagagctaggctgaggcctgggaatttgcatttctaataacttctcagacgttgctggtgctgctggtccatggactatgagaacactgtttcatgctgcccttatttacatactgagaatggtacacagtgctcttatgaatagaatgaaaaccttttgaaatcacattattccttactccatcaaattctcagctatttttgtgcaccataaagctggaatagctgattataaaactttgttatgtaaaaaagtacttaaccaatacagtagattctgtttgcaaagcattattacagtttctaatatctggtcattgttacttgtaaaattcagccaaattttctccagggcctgtagtttgataacttggacaaaggaatttaaaaaaaaatctaattcaagacctttggttttttttctgaacatatcttttttttctttatgattcttatttttacattttacttatcatataagccacttaaacccatatggttccggaaaatttaaaactatatgatacatttagagcatgttgaatgcacagatatggaaattaagtattcttgactcattctagactagacctggcacaattaaaatttagggattcaacgtacacacacatagattccgagagaaatgttgaagccgtaaaacccccacacaagcaggaaacaacagtcttacctattattcaagaggcacgtaaaggagctcatttgaggagattttctgctgttattgccatcgaatttttaacgtattttccaaattagaaaatattcagcctgatgttgtcaatatttcagaccacaagggtatcatttaggaaaatggtttcttactgtcctgaaagagttactgttcttccctaagggcctaatttacaaagcagcaaacttgctggtaggatttggctgaaaatcacattgtctcggtagaactctttcatctgatttatgtgcattgcattttgcaaataactcttggaaagttatttactagttactttctctggaagcagagggtaagcggcatttctagtttaaggatagaggagctaagatgcatcaagcgcagctcatcatgaagctgatgctgataaaatgcacaatattacattctctaagtttcactctgccatgggagaatttcatatttttaaattttgtttgaaattggactacattagaaaatatgtcaaatgtctaaccctgcatttatattctggaatgtgacagcttatttctgttccaaattttgcactggagatggagtaagtcttaatgcaaactgcatgaaactgccacttttataggtcacacccagtcaattgtcagcagttacacatggttcaaactgtaaggtgtatgcccaattgtagcattgagattcgtggagttgttgcagtggttctgaatttttcaagcatgatacataaaaagataaatgactcttttgatatttctccttgcattgatagtttgcctgaaaactagataagcagggagccggcagtccacgttagcccttgaactacatgaggtttaatttatttgcccaaccagaaccctacactacctttcagctgtgcagtattaaagtttatttaggagttgataaatagcttagtgcaatgcttccttttttccagtagctacatcctcataaacctattctaccctccaccagttaatgcagacagaagatttttatccagtatgagcactgaaactccactgtggaagactgtgtgctcagcaaaaacctcacccatgatgaataaacagctcttccgggggctttgctgccgctggctcggcaggagttgtttattgcctggtttgcacatcccatgataaagttgctgctgaaataaattgcagttttgcataattattgacaatcacatcttaacaagcaatgtgtatcatattcaagtgttcaattttttaaaatccatttttagcttatgtttaatcccagaaagtgtttgtgtagtaatagaaggcaaataagacatttaaatagagtactaatttcctcattgcagacaaagtttacctgaatctttttccataggactgttactgcctaaggcaattttcctttctaagctattattatatagatatttgctgagggcatatgtgtgtgtatccacaatacatgcattttatatatatatatatatatatatatatgatcaaaaatatgaatacatttttagagtttttgtcatgaaagagtttgtttcatctttttaaaatattacaggaatggggaaatgggatatgggtagaaggaactaatgtttttgagtaactgtaatgtataactgtataacgtggggcactcaacttcacaggaattttttattttaattctcatcacagcaatagatattgcagatgagaaactgagaatcagagagggaacttgccatatcacgtaagtggtaaagaacactgggaattgaactcagatctgcctagtttttaaaactctactctttttcattacacataacatttttattttggaaaatgttctcagttgtatgatcaagtagttaaatatgaaactaacacaataattataactgatgtcatgcaaaatgatagtttgcacaaaatgatagtttctatgaaatgttatttctttacttgttaagtctttcttcctttgccctccaatccccttctttttgtcttttcctctagtcttttccttttgattctaggtttgtattttcttgacttttctccttgcatatcaaatccttgttttctgcctcagagcagcatcaaagacaagcatggtacagggattttagggttttaactataaaggtttgtctcaaatttggcagtatattaaaaataagctttcaaaattgaccaacaaaaactacaaaattgaaaaaaaggtactttgaactttcacatgttcaaatatatgtatatatatttcacatatatatatgaaacctcctctgtggagaggggtttatagaaatctgtaattgtcattcttgcatgccttcccccatacaaacgcctttaagttaaataaaaatgaaagtaaatagactgcacaatattatagttgttgcttaaaggaagagctgtagcaacaactcaccccattgttggtatattacaatttagttcctccatctttctctttttatggagttcactaggtgcaccattctgatatttaataattgcatctgaacatttggtcctttgcagggtgagtgagcgagaggctgctttggaagaaactcatagattactgcaacagttccccctggacctggaaaagtttcttgcctggcttacagaagctgaaacaactgccaatgtcctacaggatgctacccgtaaggaaaggctcctagaagactccaagggagtaaaagagctgatgaaacaatggcaagtaagtcaggcatttccgctttagcactcttgtggatccaattgaacaattctcagcatttgtacttgtaactgacaagccagggacaaaacaaaatagttgcttttatacagcctgatgtatttcggtatttggacaaggaggagagaggcagagggagaaggaaacatcatttataattccacttaacaccctcgtcttagaaaaagtacatgctctgaccaggaaaacatttgcatataaaaccagagcttcggtcaaggagaaactttgctcagagaaataacttagggattggtttattaaattttaaaagttgacatttttgagtgtttatttaatattttacagggaaagcatctgtatgaattgtctgttttatttagcgttgctaactgaatcagtttcccttcattactttcaaatatgttttgaaatgttaatctggcattttgtagctttcttcctaacatgatctgtgaaaataagaatgagatggctgaatttgtcgtagttaatgatcaaacaattttcagacaattgtttttcctagaaacaaaaattatttccataaagttccatatgcataaacagtgaaaacagaacgtggggtagttttgtttaaatgaagtcttggtgagaatcatattctgtagtacaaggaggctcttaaagtttattctcaatacctgatataattttcctgaactattatggagttttgttatgtatagttggtttttctgacttgatataataactttactagtctctcaaatacaatttggatataaatcattataataagatgattgattttttagactaactttattttttgatatttttaaactattatgaaaaactattatgaaactattatgatatttttaaactattatgaaaagtatattctagtttgaataattccagaatcaaatcataataagcagaagttcttctcctctccctcctatcgttctccttctcctgtttttcttttttgatatgatagttgatctactttgctgctctgttgcatagagtacgtaacagtggcaatgtatggctcctgaatttatcgttcttgcttcatcatcctgctttgaccccactttctcctccaaaatgcgtgttgagttagtttgatcatttggaggtaatttgtttggaacagtatcagactttatagatatctcccatggcttgtgatagaatataagggcaatgcaaatgtagagttttttgctcactcttcgatgtatggttagacaatgtaccactgtaatatatttggcttaggctatttcataaataaaattttattataaaatattataaatgctgataaagctactccagaattttaatagatatgtgggtttcccggccagatgcggtggctcatgcctgtaaccccagcactttgggaggccgaggtgggtggatcacctgaagtcaggagttcgagaccagcctggccaacatggcgaaaccccatctctactaaaaatacaaaaattagctgggtatggtgacctgcgcctgtaatcctagctacttgggaggctgaggtgggagaatcgcttgaacccaggaggcagaggttgcagtgagccgaggtggcgccactgcactccagcctgggtgacaaagtgagacttcatctcaaaacaaataaataaataaataaaaatacatgggtttacattttacccatcagctatggtaggtaaataataagctttgattaagtctattttagtctatttttagcagattactttgaaaaataaagaataacccaatgactaaaaaattattttatgtcagggatttaataaaacatatctttaaatctagttgagggcaaaaatacgtctattttctactatacaatttgtatttatatctgctgtattatataatgaaaatttatctctatttctaatctcaagaaactgcaagcttctgaatcattaaagggaagattcaccatgtgtcctaactatatttactatggaagcatggaaaataaatattttatgtttagatttctgatctctctttcaaaagcagttggaaattatgctgagaaaatgtcttagcttatcccatgttactcaagaaaatgtatttattcgtttttgtccagtggcttaaccaaaccacagtttatttgttgctcacataaagtccagtgtcgatcaggctactcttttccatctttgagctaaggcacatattacacataactttcagtgtacccgaggtagaaaaagagagagcttgggaataaggcaggggctttttactgtctcaaccccaaagtgataaactacatttattctcaaaatccagataaaactcccatagagcctctgaaaacctcaacatttgcgtcttaactataataaggttaactaagattccaaaattattttaaaacagagacagtttccctcttccctggcagctaatattgtattttctataaatccacttgcccaaggtttaaactacattttatggattgaaatgacatttatagccaactcctgatttttagttagatggttggataatgatcttttgatgaaagactcggagatgtcatggtaaaacggtgaactactgaaactattgattattgttaatggcacatttcagctgattgaattgagtcaagaaactggtgttgaagagcaacaaatggaaatgccgagcttgaaaataaataaagcagcataccttaagagattacatgcaatttcagtatttcagctaaatggaagtgtttgctttttttcctctatgaatttttattttgaacaaaaggaattttctataatatgtaggtaggagaaaagtgaaatggcatgctttttcacttcatttgaagaagctggtagcattgtattcatagattcatgctgtatagcaatcatagttctcatatattaaaaaaaaaggaaatttgaaatgcctagccaaagcaacagctctgccaacagattttgatatatctgtctaccccaaaagtagtgatgatttacttcatacaaatgctagtgaatgaagagagagggtgaaaaccttcacaaaatgtgtttttctctaagactgtcaatccgtttttctatatatggagactccagctcttgctagactacctatcactttcgtctatcagccacttcgtaagatatttattctctcagcaataatcataattcatagattctttaaacatacatgtaatataaagcatatacattctgaatggaattaacatgattaattcttctctgaaagacattagaatttcctcccgtattataaaaaggtgtaactcactttccttactaaaatcaagaactttaccgtcgtccttgtacttcaggataagggggtgtttcttataaatattgttatttctgatatgctaactggaatttttaagcaaatgtatttttatagaacgccatacaaagcctttaggggtgaaagtttcaggatttttaaattgcagatttatcctttaaataaaaaaactatattcgtaattgaatcggattatttctctatccaaaacattttctgctttgggcctaagaagagttgacaaagctgttcatggttcaaagtactaccataaaaccctgggtaactaactgaaaatggaaagactctgtctttctgaatatttcacaagagtttcacaaatattaagtggttctctaagtacccctgagagatcattgtaatattagcttgtaaagacaatgtgggggtgtgggtatgtggtgacctttatgatgttcataaaggtggtgtaattaacatatttttctcagcaagacaaactaaggagcaataaatatatgagataccttcatctgtgatctgggtcatgtctcaggccatatctttcaaatcactcccttccctaatctcgtgttttacctacgtctcctctcaatccccccattataaaaattgtcttctgatgaataaaacatttccagagagacaagtttcataaagtttgaattgtacatctgagtacacctatgaattaagatatctttgatttctaatatgttattaaaattgggtgtggtggctcacgcctgtaatcccagcactttgggaggcagaggcgggcggatcacgaggtcaagagatcgagaccatcctggccacaaggtgaaacccccgtctctactaaaaatacaaaaattagccgggtgtggtggagtacgcctgtagtcccagctactcaggaggctgaggcaggagaattgcttgaacccaggaggtggaggttgcagtgagccgagatggcgccactgcactccagcctggtgaaagagcagactctgtctcaaaaaaataaattaaaataaaataaaataaaattggagaagtttctcaccaaaattttggcgcacggattaattctgaagaaagaagaaagaatgcaatcttagtagcacaattagtaccttgaataaattggagtatcgtatttcttggactatctgagaatgcagaggcaatttaaggatccctaattctaaggagaagaaacctttagtgtattccttcctgttgctttagtttgaattgagttttatatgtattttttaatctttctattttgattgttgtctaaagagtgtgaaagtgaattttgatatttttattttgcctggcgatgaatgccttctgctctggatatttaaaaattatatacacatatatgtgtgtgtgtgtgtgtgtgtgtgtgtgtatatatatatatatatatatatatatatataaaatttttctgagaacttttattaattcagcgtatctttgctaaacacctgccatgtgtcgtggtgttaggtctggtgatacaaacatgttcagagagatgattttctttcttttttggggggtgggtaagggaaagaaggcttatacaacagaatcttatttctcacagttctggaggctgggattccaagatcagggcctggtgagggcccctcttcctggtttgcagatggcttccttctctctgtgtcctaacatagcaaagagagacagagctctgatgacacttcctcttgttataagggaactaattccatcataagggccccaagaaaggtgcttttcaaaaacagttcagtaaaagtactgggttgtataatcactttaatgagtatcaatccatatttttaagatagaaatgaatgaaattagtaaaatagaatagaaataaggagtccatcacttttaagtaagtttcaatattgttcgtaaaactttggttcggtggtttgtgtgtgtgtgtatttgtgtgtgtgtgtgtgtgtgtctgtcggtgtggaaatactggatcactttgtaacatatattcaaaagcctctgtattttaacattatttctgcctttgagaggttcacattccagaggtgaagacatacatcctaagacaaaattataatagcattatgagaattacagtagagagctggacagggtctagcaaaaacagaagactaggctaaaccttccaaagaggccaggaaactcacctagaacggtggattttaaccttgcttatgcactgggggagattttaaaaatatctctgcccacaatagataccaactgaattgagcatagcatgtcctacccatgaatctattgtccagtgagaacctctgtttagagaaagtcaccttagaagaattgttaggagttatttaggttcatggggttgaaaagagcattcgtgatagaggaaacaccatatccaaaggcttagtcagtgtggtagtgtgagaatctgaaggaacttggctggggtatggttgctacaagaaatgaaattagatcaactggggctaaattatgtggaaagacagcatgatgtagcagctagagtatggaccttgtaagcaggaagaccccttatttagcacttactagcttattgtctgacctctgagtcccaattttactcttctatacaatgagtacatcacaggattttatcaggtttaaatgataagatatatgtaaaatgcataccagagaggcagactattggactcgaagggctcagtaagtgtaagctggctctctctgccccttgccacctatttttcagactctggacttttatcactttaagtcatagcctagttctaagcaaggaaatggactaatcagacatgtttttaaaagatcattctggtagtggttaggagaatgaattggaaagatatgagacccatgcagggacaacagttaggacattatttctgtaataagccaagcaagaattgatgatcaaagtggtgaggttgaacaaacaaaacagatacgtgagctatttggagataaaatcaacactgtcatatgttttgtgggaggtggaggtgagcagaaaatgtgaggtaaaatgagaaatcagtgcctgcttaccacttggcatgattgactgaaggtagtgtcttcactcaatcatgagttgcagaattcaagatggcaaacagttgtgaggagcaaagtcaagaacgtgtttgattttgaggtatctgtaagtgaaaaatcagaggtgaaaaccttacctctcttgaagcagttgtgaatgtaaatctaaggtttggaaaaagatctgggttaaagatttaaaattgaaggacatcaacatggaagccatagaaataaattatattacacacaaatttatgtcgttatttgaatttctccatggtccactcagaaatatatctaaatgtcaccaaaatgttacttactgtagtacagaattggtattaagtgatactattgtccatgttattcaaaaagacagttatagggaccctcttaataaactaattgtgaaaaaggcaaagaattagcaaagctttggcataaaattcatatcatgggccaggcgtggtggctcatgcatataatcccagcactttgggaggctgaggtgggcagatcacctgaggtcgggagttcgagaccagcctgaccaacatggcgaaaccccgtctctactaaaaatacaaaaattagccaggtgtggtggcacacgcctgtaatcccaactactcgggaggcagaggcaggagaatcgcttgaacgtaggaggcagaggatgcagtgagctgagatcgtgccattgcactccagcctgggtgacacagtgagactccatctcaaaaaaaaaaaaaaaaaattatgtcatggaaaaagtaaaagtctttgcataatgtatccaagatcatgaaaaactcttttcaataagataattagttccttttcttatataaacatggaaattttcatttttccttttattctcatattgatactataaaaaccccatcctcattcacaatactactgtctctaccctcgatagataccagttcaattgaacgtagcatgttctacccatgaatctattgttcagtgagaacctctgactataatgctcaggaatactcaagactcacatgattgtcttcttgctatatttagttactttattattttccattttgggaccctgaattcctgtagatctcagagaaaatccgaaatgaaataatgaaaataattaaaagtttagaaaagggagtcaatggggacaaatgttcaggactggtcttttatctcctgcaggaagaaagactgaatgcagaaaattagaatccatttttcatccagtcaccccaatttaatgcaatatgagtttagctatttgattttaagtgttgtaccgttttggaccatgttaccatggtaacatgaaccatgtctcattcatacgtaaacatgttaattgtattaaaacctttaaaacctacttctggatgttgccattacattaaacaattatctagaatgatacaaagtaatgactaaattgaataactttgtaaattaactattggattttgtaattttatatctataaaccaaaagaaaagcccacattggtaagaagacactgtgcatactgaaaagtcaattttgttagcctccaataaccattgtgttttattcctcgcagagcttttgtgaggatcttataagggaataaatatgaaagcactttgaaaaagctttcaagtgaaaggtccttattaattttatgaattaccattaaacaaaagtcaaactgaagatgtaaatctaataggatgctcttaaaagtcaatggatcaaagttatattaattaataaagaataataactaaatattttatgtttcataattggcaaagtatctttactgtcattttctaatttgatccttagtgaaaacctgtgatgttggtactcctattatttccattttcatttgagaagaataaaattggagaggttaagtaatttatctattgctacttgttaaaataactactaaattttattactcccagttaggagggcaattatataaactaaaagcttgtcacaataaatgtttacttttctgggattaaagtcatcatgtatttttcaattattaaggggggtaataataataatagctacctttttaaaatagttactatgtgccaaggtgtgtactaagtgctttgcttgcatgatgtaataccatcgtatatttagtacagaggaaaaactgagaggctgggtaacttctactaaggtaacacacaagtactggttgagtatcccttatccaaaacacttgggaccacaagtgttatggatatcaatttttttctgattctttttttggatttcagattttttcagattttggattacttgctttataattatgggttaagcatcccaaaccccaaaattcaaaattggaaatactccaatgagcatttactttgagaatcatgtcggcgctcaaaaattttcagcttttagagttttttggattttggattttcagatttgggatgctcaacccgaatatatagaaaagtcagcatttgaacctaagtttgactttctgatcttctaccaactctactgtcctacccattactctacattgactcagcattacagggaaagacccaagatcaccaaaagcaagcttcaaatcactcatctaatagaaattagtggaaatatttctacttcctaaacatccatctttcctttacattttaaagtcaagtttctacatctgcctcccaactgaaacacttctctatgaaatcaccataactaccaaatgcaaatatttttatcaagtcctcattgccctagaaatctactcatattttgttattactgctcactacagcctactgaaaaatgtctcaccttttgacttgccagggtgatatattatactaattgtctccttgtctctctaagcactcattccttcctctttctttcttctttttttttttttcacttttattttaagctctaggggcacatgtgcaggtttgttacatgggtaaattgcatgtcatgggagtttggtgaacagattattttgtcacccagataataagcatggtacctgataggtagtttctcagtcttcaccatcctcccaccctccaccctagagtagatcctggtttctgttgttcccttctttgtgttcatatgtactcagtgtttagctccacttataagtgagaatatatggtatttggttttctgttcctatgttatttcacctaggataatggcctccagctccatccatgttgctgcaaagaacataatctcattcttttttctggctgcacagtattccctggtgtatatgtaccacattttctatatctgatctaccattgatgggcatttaggttgattccatgtctttggtattgggaatagtgcagcaatgaacatacagctgcatgtgtctttatggtagaatgatttatattcctttgggtatatacccagtaatggcattgctgggttgaacggtagttcagttttgagttcttagaggtatttccaaactgctttccacagtggctgaactaatttacattcccaccaacagggtataagcattcccctttcttcacaacctcaccagcatctggtattttttgactttttttttttttttttttttttttttgagacgaagtctcgctcttgtcccccaggctggagtgcaatggcgcaatcttggctcactgcaacctccacctcccgggttcaagtgattctcctgcctcagcctcccaagtagctgggattagaggcgccttccaccatgcctggctaattttttatttttagtacagacagggtttcaccaggttggccaggctggtcgcaaactcctgacctcaggtgatgcgcccgccccggcctcccaaaacgctgagattacaggtgtgagccaccacaccaagcccacagtatcaattctatgcattcttttctgatttcattaatctcattatcttcatttgatatttagtcaatagttactgtcagttatgtgttagttattatactagaaacagtcttttctccatctcctttaatccaatgatttgaacatttttattcctttccaatgtctgtcccacatttcttactgtatgtaggacatttcttactcaaatgtctcacaaatgacataaattcagtatgacccaaataggccattttttataccaagtcttatttcctatcctgctgttcatcccggtaccatcttttcagtcagagagttcagatcatatagtcatttctaaatctcccacttacttgcctcactttcaagttcatttttaaggtctgtagattctgcctccctaattctttatgaccattcctttctcactagccccttacctccactctcattcacactcttactattttttaccctcctccactcattcctgcccaccagtggctccaatccaacttgcagatttccatttaaattaagcttcctaaaacatagcttaggttgtaactacaatgcaaattccatgagagcaaagatttcatctgctttattcacttgtatatatccattgtccaagactgtgtgtgtcacatgaaaagtgttcaataagtatttgtcagtgaacgaaaataatatatgactcccctcttcaaacaccttttttgacttcaaagcccttcagaatattctacagactccttcacctggctctccacaattgcccctgagtctcgtttccaatcttatttcttattttacctctcaatgcaccttcaactcctactaaaatgaacagctagccagcttacttctgtgtctttcgatgatcttgttttttgtcttgagattcctttttttcatctaagcttacccaaacattacctacttttcaaggaaagccattttcgaatcttccctttttccctgagcccccaagctggaagacatcttgtctccatctcaattcctataggcatttctctgcactttaaatgacgtttagtacttctgacattgcattagagagaggctggggtggatagtgtttcatagtgtgaactttgaagcccgactgcctgagtttaaatcgtgattctggggcttactgaccatagacgcatttctgaattgctctcagattatggagcataaatcaaaagtaatgacagctacctcttcaggttgttgtgagggtgatgcgaattaatgtactgaagtgcatggaacagtttctggcacacggtaagcacccaataaacatagctaatattatgttattactattttcaggcttatttttatgtatacatatagtatgtaattttatgtcaatatgtataaatagactttggtattgtttatttcactatcaccttgagagcacaattctcatttgatttgtgtgagaaactacttagaaagaaatagacgtgtgaatgaaactatgcttgaaatattggttactgtgagtgttgaaaatccattttgtttaaagaaagcttcaattgttaatcttccataaattttagttcttaagcgttcatattgactcgttttggaaaagctctttaaagtcttgggatataaacaaggctgaataccctcattcatgataacaaacatattatactgaaaattgtaagagagatattttatctttcataatgccctccttgggaaaatacattgacttggcccttctctttcaatcagacaccaaagttgagattgcctgaaacacagtttggtaaaaggagtttctttttcccaaacatcctgagtaacacaggaaatcacaccaatgactgatagataacgttaataaaattaataaagttgttttaaatgcataccatggggcagtggcaatgaaaacattgagaaggctgggactatttgccaactttctttgatctccattagaacctggacaagatccacataatttcagaacttcttctccaaacaagaattgaaaaggtcaggaaaagtttgaccacagaaaaatgtcaaagaattttgtgtcactttctcctcctcccttcctctaaccttgaataattttttagggttattggtctttgggagcagactttctagaccaaaacaaaaaaaatgatattcctctatgtgataggtaacaatcactacccatcctactggaaaattctcaaagtgtaaattgaggggataaaaaaagaatcttaagtcctttaaattatttttaagatgaactacattagtgcctctcttgtgcctttcataattctgataataaaacattccaggtattagtcaaagattaatggtattgaaaataatttaggttatcagcatgtgattttcattccacatgaggtccttttgcagtttacatggttttctaaattatattaaaataaaatgtcagaaagttcacatttttttcatgtttaacagcatcaatctttaaagaaaagttattgcacaaaggtctgtgcataaatcagccattctccgaagaggtaaaagaagtcattacgcctggttatgagagagagtttcatgaatgtaagagacataaatcatttcccactggagatcatattagtctagatggaagaatgtctgtttcttgatagtgagaaagcaacaaattacttttgtttgctcctgagtctgtggttgtccttgagaggtctgttagcatgttgactattgactattcaatattagcattataataacttacaatgatctgagtcacataaatataatctttcagttctctaaagattttactttttcctctctaatatctattcacctccaacacctttgcaaatatattattctctgggagttacaaagaaagttattctctgcaggaagcagcatttcagttgctctcaggagccaaccacatttcacctcaattctttgctcccaattcaacaattcaatattggattaaattcaaggctgtgaccccaaatagaatgagacctggatatttatgaaccacttgaccaggcattcttcccatgatttactccataaatcctttttagtttttgcagtagctttacaaatatttggaaaatggctgtgcaatgcagttttaaaaagtgcaatgagtagaggtagcttcttcacctggtatggtaaattgttgattctcttttggagtggaaaacaagtgttcttatttggatgcaaccattgcattgattagacaaccctaaattcatctttcatccatgacctgaaagaaattttgaaattcatgcaatatatacccgtagtggaaaatgtactttttgaatggattcctgaatgtgacttttaagaagagctattaagaagtgggatcttctacagaacagtaaacaggcatgaaaatatacaagttgataagatatggaactaccccaaaagaggaattaatagtggtggggcttggggcaggaggacagagagacctagccaaggaaggaagggctatattataatagagtacaaagtcctttagtcatccaagagaaggggcaccttctgcatcccttatgagtaagatcagagaaggtattctagttaacttttgctacataacaagccagcccaaaacttcatggcttcagtaaaaattacttgttttgttcatgaatctacagtttgctcaaggttcaatggggcttgcttatccctgtttcagttgatatcagttggggtagattgcctgatgctggaggattcacttccaagagggctcactcacatgcctggaaaataggtgctgactgtcagtttttcttcatgtggacctctccatggagcagtttgggctttttcacagtgtaagagttgggtcccaagagcaattatcctaagggacaagaaattaaagctgcaagcttctcaaggcctgccctaaaagcaagaatggttttgcttctcccatattctatttgtcaatcagtgacagagctctgattcaaggggatgagaacataaactccacctttccatggagaagtatcaaaaagttttgatgccatttaattaaagctgccatacaaagtttcttataaatgacactgagctgaatgaatactaaacagcaagtagtcattatcccagtcaagagaagttatctttgctcagaataccctttctctccttgtctacctggaaaattcaactcttggccaaagccctacctcttctcgaaagcattaccaggccttgcctctaagtgtacaattggagatacaccagtatactgatgtttttaaaactttaaacttttttctacaataaaacataaattaaataacttcccttctgacttaaaagctgcaaaatgctcatgacagtaactatataaattaaaattaaatcttaagcacgataaatacctctcgaatagcaacatagatgcttacttctttatttcacttctttatttgcttttctttgtctatagtttgccccaaaggtattttaataatatcgggttccatgtataccagtgtgtaccaattaatatttagaatatacctgttaataacctcatttgcatagccctactaatctgagcacagcgcagccttaagaaagtcttagtttttctcagtttagttcatctctcttctcttctcctcctgtctctcttatttcctatttctttttcttttcaagtgactttcaactaagtagaaaatgcatttcacatcactatgccggcctccaggctctgtctatttcattcacccaggaatgccctttctgaatgctttctctcatttagcagctatctattgaagttggacaaatgatagaaattcatttcttaaagagccagaacatcatcttgaacaagaagttaaaagaattcagcaaatcaaaagatgagctaatatgggtgaatcttagaggcattatgctaagtgaaataaaccagacacaaaatgaaaaatattgtatgattccactggtatgagctacctacaacagtcaaatttatacagacgtaaagttgaaggatgttaccaggagctggaggaagaagagaatgagggcttattgtttaatgagtacctgagtttcagtttgggatgatgaaaacattctagagatggatagtggtgatggttcaacgataataataatataatattaatgtacttaatagtactcaactgtatacttaaaaatggtcaagaaaatggtaccccgttatcctgatgtgattattacacattgtaggcctatatcaaaatatctcatgtaccccgtaaatatatgcacctactatgtacccataaaaaaaatttaaaggctaaatggccaggcattgtgggtcacttctgtaatcccagaactgtgggaggctaaagcaggaggatcacttgagctcaggagttcaagaccagcctgggcaacatggcaaggccccatctctacaaagaattcaaaaattaactgggtgtgggagctcatgcttgtagtcccagacacactggaggctgaggcaggaggattccttgaacccaggaactggaggaagcagtgaatgacactgtaccccagcatggtcaagatcccaaatcaaaaagaaatgattaaaatgatcaattttatgttgtgtatattttgccacaatacaaaaatggggaaaagcctattcgcttttaagtatccttaaaaaggcacagcttcttcagctaacagactctaaaactttttttaatagaagtattaaggtatttagagagtgcaaaatatcttattttaagtcaagaagttagggtcctgttcctaaacactagcctctgtaatcctggggaagtcagtgctgttggagatctcaggttgatcttctgaaaaatgatggatctaggtaaaagatatgtttctccaggtttacataccacggacaccatctttacttggaaactttattaaaaatgcattgtgtcagaagctctctggggatgggtcgtggaatctgcatatgtaaagagcccctaggtagttcttgtgcccacttaaatttgagaaccactagaccagatgttttgcttatggccctttcagctctgaaatttgaaaaaaaaaaaaatgattctgcaagacagagtctctgtgcttttgcaggataaagaaatgaagaaaataatacttcctgcttgtgttggagcatttttttcatttggtatccccatctccagtggctagccaatcaagaatagtattgtttattcttcccactgttttgaagatacaaaaggaaaagctaagccagatgacacctaaaggcttccattaccattttcatgtttttccctttgcataaaaactgtccatgcctccatcagagccatgatcactagtacaatgttacactctaatgactcatgacattaaattatatcttagcctaatatgaccaaattacaatatcagaataaaaatttcttttttcaggttgaatcccataacttaatccaattataatactggctgaatttttcacaattatgtctcagtcttgatttagggaatcttctctttatcataaaaatgcattttgttaaacatgtttcattataatcaatttctcaaaagtaaagttaatcaagagaaggaaaaaaggttttgttttgatttgatttggaatgtgtatgtgtgtttactgtattgaaatagattctgtctgaaagactgtatataagataaaaagtacagaagagtagtcagagagttattacccacccctgactgatggtgaatagattatctaagtatcccgtaaaaggcacaactccttcaggtatattttacaaattaattagtaactttctagccaaatttgtgtcttaaagacaccagctagaacttggttagttctagcaaagaagattattttattctgaaacaggtttttgttgtcgttttacttatttgaacttttttcttgaatatgtatttctttgcacataaaatatattgacttatgaatgtgattaaaatggaaaataattagttgattttagagagacagagagaggagaagagaagtgtgaaggagagagggaggatagaaaggagagagggagaacaggaaggacagagggagaatgggaaggagagggagagagagagacagagagagaggaatggagtgggtaataagcaagagaaaaatgccaatcatatgctttgctagtgtgtaaagtctgataacccaagggagagaggactactctggcctagtgaaacaaaggaaagagaaatatggtagaatattctcctggtgcttcaccaaatgtgacaccagaagtctgacagaagtcatgtcagcatttgagctccataaaactcaggctatcgacctaccatgtgagagtctcaaaatgagtttaggtaggggcagaggagttgaaatccagtaacatatgcaacagtgatcacaccaggattgcacatagaaagcaaattagtcctctaatagagacgccaatttgaaattcaccctctgagcaggtttttaagcacactcttcttttacttttctatttacaaaaatggaacaccaccagaaaaacaagaatttgaaagacgagatgagaaaagtaagttgtaattggaaacagacagaatgtgtacacaaacacacacacacacgcacacacacgtgcatgcacaggtgatgagagagtagtttgcctacatggtgtatctgactaagaagactttttgctctggttgtcttacaggaagtgactaaatctcatgatgtgaaatattttcttgcatattgtattggaaaagaaaataattttcccaaactccttaggggcagtgttgtcttataattcccatatagtatatgctcttcaagtaagtaactccagagttgagtaagacaagactcgtgactcagatggcatgctctgctccctagactagacattgcatcagtctgcctatactcacatccgctgttaaaggattgcctccagtaaaatatgtcttttaattccttatacaagaatctggaaaaaaaaagtaagattctctatttcttaaatttagcagcaggttaatcactgataacaataaaaatacataacaatcatctagcacgggtaaatattgtggcaaaaattacaccctgaagaattcagtcaaagatataagtaagtacacatcattgtcatgttccacaatatatcatctgctttaaagaaactgttatgtagctgtagtagatttaatcattaatcccatttcttctccaccttctgcaatcacaaccttaacaatgcctccttatgagtggaatgtacttcccaacccctagtcttaggggttggccatgtgatttgctttagcaaatggtaaatgagcaggagtgagaggtgacagttttcagcctaggccttaagagatctatacattcctgtttgtgcttctgctatcattctgagaacacgtccatctaggctgctggtctcaggaaaacgataaaagacatgaacagcagggctgcactagccattcacatccaggaaaagaaatgattgttgcataaagccattgagctttattctacattactgtgacaatagctaattgaaatagtaaatatactttggtttttcctaaatgcatattgaaaattaataatattagccatctgtatgataaaaatataaagcctatgttttattttttaatggttcactgccctaaataaatttccaaaaagtagatgttcccttgtctagtgatgtcattatattttatttatacatcataaacacactgtttatttctgctcatttttttgtaagtaacatgtgttaccgccaatcttgagatgatacacacacttctgtactaaattttggaaaacatattagctacccactccttatatcaaaatattgcctaataatgtgttttgttttaatccttcatgaatttccaggagaactgaactgatacttgggtttgtgagatatatgaaaatagtgaacatgaacttctggtttaacccttgtgatgataatggaatcatagctctgttaattactcttgtggtttgtcttcctagagataatcatgtacaaaattcctttccaatttgttatataatattagaaatacttccaaaattggcatggatttattgttatcatttgttggcacaatcattaaaacgaaacccataaagctagataattaaatgtttacaaagctatagtactcaaaacaaaaacactgtgaaaagagattttttaaataatagtttttgcatgccttttgaataattggattattctgaatttcttcatgtttagtccctgaatctaagtcataccgtctacataaaaatagatgtcagctgaagaaaaccaggcaatggatttgtcttgacgacaatctttttatatgttcagacttcatttaacattagacttgtctgtatttgaaattggtatttctttacatttctgaatttagggaaatggcacaagagaataacattaatttcctctgcattttggcctaatcaaatttgagcctttcaagagacacagccaagtcaattcaaagagacatatgaaaagactactgttaatgtatctttaaaatgaattagcggcatgaactgttgctaggtgagttaggtatagttgtagtttttagtaaccctaagagaagatgcagtgcattctaaaatgtcacaaggagtttgattgctcaaaattctgggagattggctctctgcaaggcttcttgatgtcattgttcctagaggaatgttgttccagtacctatagcgattgcagccataactatttatgtgtcattgtagccattgttattactacatgcttcacatacctctactgaggtctaaagaattagtggacttcatattctggagagaacacttgaagaaccaaacagaagtttgatgtgaatctgcatatccaccattattgttcataggttctcaggattagttgagtgatgccttaaagaaagaaagtcagatgataggtcttcctgctgcccgcaccacatcatgagtgttattcctatagaggaggagtaaagagtgggaagaaaatgaaatctgtcaatactgtgaatatataaataataaaagtagcagtaggactgattaattctgaatcatctttatgaaatgactggagccgtgaaaatgctcagtctgcacagctgattgagaaatgtatgcaatctgttgatcggaatttatttgtgaatgctctcttccagagatttatataccagagttcttaaaacgaattttgtccccatgaaaagaaaactacagatctgtaagactgcaatttaaaatggaagaaaacatgttcccacttgaagaacaactttcaaacaaacaactgatacaaaaaagtcaaaagctgttttgttttatataatagtttcagaatacttccagtcaatatataccttggtttggtgaaaaaataaaaagctaaatccttagatcattaactagaaatttttgtaaaataaataaaagccgtgggttttagtgcagtgatcccatgaagaggaatatattcaccattggtctcttaatctcagatagaatgtacatgttactttattttataacgaaagcaactgtgttgtgatattatgtataatattataacaggagaagtcctcttagctaactcagtaatcaataacattgtacgttgtgtgttattgtaaccaaaaactatgacagaaccccatttcataagatcagtttatccacctatatgatttatatttgaatattcatttcagtacttatgttgcttaaacaaagctactgtattagtccattttcatactgctataaagaactgcccgagactgggtaatttctaaaggaaagaggtttaattgactcacagttccacatggctgggtaggcctcaggaaacttacaatcatggcagaaggtgaaggggaagcaagcatcttcttcacaaggccgcaggaaggagaagcgcccagcgaagtaggaagagccccttataaaaccatcagatcccgctatcatgagaacagcatgggagaaactgcccttatgattccattacctccacctggtctctcccttgacacgtggggattatggaggttatggggattacaatttaagatgagattgtggggtggggacacagccaagccataccaaaaactctgttttttgtttttgtttaatggaaatgatttagaactttattttctgatgtttctttttcataaaaccacgacaccaaaatctacttttcactgctccattcaactagtagagaatatctaatctcttctcaagtatttctttctcaattatggtggttttagctaagaacagcttatggcatgcttttctaaataatattagaacacataaattatctgtacctggtattaccacattcattgctcattttaagatctcaattgatacattcaattcatatatatttaaaattgattcatttagagcaagagatacaggcattttaatgtattacactgctactaaagcttagcaaattattcttttttgtgcccacaaattatcatccattcatgtcctaaaaataaaattgaatttattatactttcccatttatccaaaaaaaaggttttttttaacaattgatgcagatacacattttcaagctaaaaatatgtgtgaaagtggcctctttctcatagtatttattttaggagtctagcaataatttttcttaggttatcagcacatgtcttagcctgaattatttgaattcagtctgtgtcttcaagttcagatggttatgtgatcttgttaagatctcaaagtagtgggaatgatggagtatacaacaacctcattgttttttatggcaactgtcatttactgaaggacataaggctagcagaacatggtcagagaaggaatcaaagtttggtcagccaactctgctccacagctacaagctgctagacaggcataaatttttccaaacctacacaaagggacttagggcccttggctgagagcgacattctaaccacttccttatttatggctggtggggtttgtacattttctcatttctgtataacatttcttgactgtaataagcaatgtattcattctgctttaccactttcactaaccttaacctcaatatatactcaattaagcaattgaaaacagcagttttaatcttttgacataaatgatttcctccgaagcaaaatgctggaaatcccctcaaatgcaccttttattgatgaatacctataagcaccacctacagtcgctggaggctgacaggaaccaaacttgatgataaccactgagctgagaattttcaactcactctttttccctgtatggttcttctagctgcattatttcccactatttaaagctacagctggtgaactattcaaatatttaaactttggagaagaaaatatcaacttatcacaaccctctttttatattctaaattcatatacctgtttggtacttaaaggaaaaatatgctgaggaacaggctggtcataagactgtatagaacgtgcatcttccatcctattgaggtgactcctagacaatgggaaaaatgccttcactcgacttgctcattaaatgtgaccgtagctgctaatcttttggcgctgtctcgaactttaattagatgtgctcttctcttgaaggttggaactacagtatccagagaccatagaatcacagagttgaaaacaaaatcttggaaatcattgaatccacttatcagatgagaaaaaaaaaataagcccatggagatagccattttaaaacatatcattctatttagcctccaatgtaaaacaatgagttactatgtttcaataatgttgatgttaagaaattatttgatagcttcctcacttggtctcctatattcctccaaggttactagttaggaagactgtcattcaaatttggagactacataagaagcagaaaaagcatataaagaggcacatgaaattggaacttttctggtaaaatcttctttcttaaactctcctcaaataagctgttggtggcaggaggtgaaagacagcctccaccctttagcacagtccgtacttgtcagcatttcccaggaagggtgatgtctggaaatgatagagattgtggaagcacattgcattatgggtcaagaatgcgaaggtcaaggagtggagtcttcctttacgaagtagtgttaactgcttggcgtggcattgttgtaaacagaagccaccaggaaggatcatccttaggagggaacctgtagatatgactgaaaacaagagagatccagttttaccactctggaaacataggtaatagaaagcccaaaaggtaccttatcacttgtttgttcctttctgtacaaaaggacttaaatcctttctgagcaagaaagatatttgagaatccaattttgttttaaacttgagcttagcattttggaactattccaaagaccacagaattcacagtcattagcataccacagcagactcttttcaaatattgcaaaccagaacagtctgcttgaaaacctggaaatacgacctagtgggttcaacttgactttttttatttctaacccttacccctaggcaattattgataactcattctggtacctggtatgtatatggactttgttagaagaatttgacaactttctaatcatctgttttttttcttttgcttgatagacatacatttagtagaactttactggattgtattgattataaaccacatttcagttcatatcagtccattttgctgcacaataaacaaccaaaaaaatttaattcagtggctaataacaacaatattgatttattcatggagctgcagtttggtagggtttggccaatcatggctggaaatggtttagctatgcttatctctaggccgtcggttctgttcgggtctataccacatattttcttctgagactcaagctgaagggacatcagctactcggggtatgacagagtagcacaaggcaatgacagaagcacaaacaacacttttcaaaatctctcctcttgtcacatttgtttatagcccattagacaaaacatgtcttgtggccaagcccaaagtcaaggggtaggaaaatactttccacctatgtgaggccatggctggagcgtgaatgtatgatactactagggatgtgaaaggattgaggccaataattcaatcttctattggagacaagctcaacgagttagttaaaatggaaggctaatatttactaactttgcaacccaaggaagagaaagcaggatctctctgacgatgacggaatttcataccctcatctttgaagttatactaaagcttaggaacaaccgtcagataggactgaattgctcccccttccagattcagcatgtgaagtatgcagcatcttattatagcagtagccaaaacagccgttttcttcaatttgggaatacaatgtaggtgtgttaattttcaattaagagttctaaacttattatctgcttggtagctcttccatgtgacagtcattccatctgactcttcatgttggcttttgaactaaattttaaaggaaccgccaaaatttaagggccatgtactttttataacctgtttgtggtctgggtaagaaaataaaaattatacaactgttctttttgaccagccacaagcatgtaatgaaaatgactgttttggctagcagatgtattagaagctttcaaggtgtttaaaaaaaaaaaaaaaaactggagaaaggagccagtgaattgacctcaaacaaaacaagaacaaataaacaaaacacttgtctgcacttccaaggaagggtgatatctagaaaagatagagatgatggaagcaccttgcattatgggtcacaaacgtgaaggtcaaggggtggcgtcttcctttatgaagtagtattaactgcttggcagggcattgttgtaaaaagaatccaccagaagtgaaacaagcagcactaaaagttaaaagatttatgtgtaaacctcatctaaggcaacagaagccatttctataaaatagtataggaccttttattatatatggtcctagagtatattaaaataagtctgtttgggtccatttgcagctcatttgaagatttttataggaaaaacatcctcaaaaatatcatactacagtgccttgatgcttttttctttttataaggtactgccagcccaaatagtaagaaaccgatatgatttttgtccatgtgaggtgtttaattgcttcccaaaatatggttattgtgtagatgtcactaacgaaatatataaagagcagtatttgggaaaatttattttaataccacctttttccttttttaccctaaaagtatttatttttttcgtagcatacactctgtgtctcagtatcattgtttttcataaaaacataaattcttaacagaaaatttcctgcaagctcccctaagcttgaagagacaaaggagatttgtaatgtagctcagccccaatcagggtaaaagaatgcagggctgactttatacttataactcagaaaaaggttatgcttcccgtctcttcacagagctagtctcttaattgattccgaactaggaacatgtacaagtggcccacgatctggaacagactggcggataatggaatattgagaccttgtctatggtcagccatattaacactggataagtctgataacactgtgattacatatgtatcaatatagtatgctgttaatatattaaaaacttatttacaacatgattattggacaactgttacagtacagccacatcaatcctatatcaagttagaccatgtcaactggttttgtgttgagacacctgtgtatggacatagtctgaacttttcatagtttgtgctaaatgatagcaatcaacatcggtatggcacttacagtttactgataactttcatgcccattaacatagtaccgcaataactctgtgaagtgctgaatttgtgtcctgtttcatgattgtatttgtgttgatatctcagtcagtcagagtcccaacaagaaacagatggcacattcagattagggtaagttgaggagtctttatttacaaggcactacatactcaggattgggcagggtgtagggaaatctcacaagatagcacaagactctaggactagcagcagcagagctgtcacctctcctagacctgaagccgttgttggggagagaggtttctcagagcccagaaaaaaagaaaaaaaaaaaaaacatcatgcagattttaatgccttgggaggagcagtggctttctcttaaggacagaatttgcctcgaaatgatactcagggaaaaagagatgaagggaatcaatactctgacccaagactctcccttctctgcagtggtttgctagtcctctccttggtcaaacccaaacagaaaaccatagggcataggagtctaatgatgtaatccaagtcagccccctggaaggtggaaaaagaagggaaaatggatctggatctggagggataccaaaaaaaaaaaaaaaaaaaaaaaaccatagttggcatgcttgtttattgatattttcttgcatgatataagaatccagataaatatagtaagaggtctattttactaacaattttaggcacctaataataatactccttctttgaatgtataacctctagaattggttcagaaatgtaactgtgccgttacaatttctattagtattcaacagtagattcatatccattcatctatgactggagtatctgccatttgctggttagttactgtgtaaggtactttgtaaggtatagaaatacacttggggtgcgatggctcatgcctgtaatcccaaggatttgggaagctgaggcaggcagatcacttgagtccaggagtttgagatcagcctgggcaacatggtgaaaccccatctctacaaaaaatgcaaaaagagtacctgcgcatggtggcatgtgcctgtagtcccagctactcgggagcctgaggtagaaggatcacgtgaacccaggaagtcgaggctgcagtgagccataatggcacaactgcactccagcctggatgacagagtgagaccctatcaaaaaaaaataagaaataaatttgagctcagtgacctacattctagtgcagaaaaaaatgaccatagttgattatgagattttaaagcaataaaccacatgagacatactaatgagctcataagatcattcagaaattgtttattatgaacacatagtactttcagtgtggcattaaacagagatcactgtccttaaacaagttaaaagcagaatcaaatcatctgcaaattaacacaccactaaactttaagcttcttgagtgattctgtaatttttaaaatgtcttcagcatttcagtgtcaagatagtgcaaactcagtaaaagcttgtggaattgcattaaacaaaaccaaaataaatagattttattaaaactatatacaattgtctttctaatcatatcctctccatgaatagggaagaaataattttaggaatttaaatatcttctatcttaatagttcctcttatttccctcttaagcaatgttcactccttcaaaaatatttattgagcatctaatatgtacttaacactgtgccaggtgctgtgaagaatgccaaggaaatagaatgaacttctaattctttggagttccaattaaataacctaaagttaaattggtttcggagagaacattatgccttcgagactgtaggcttctcttgattagaaagtcttaaacattttaagtaactaaacagattaaggagaattcaaggatgcctctcactagtaaatttggattagtctggcaaacttcagaccttaaatgcaagatttttaataattaaaagaagagagaaaatgataattacatttctagagtctatgtttaccattcagccttcttaatcatttcctaagtatatctggtgatcaggattttataactccagaaaatctttctatacatcgcataaatctcttcttttaaaaagctcttcaattttgtattttgttaaaacttaaaagcctccatgaaaaatgagacaaaagtcagtgagaggctgtagcaataaaaatcagatgtgattttcttttgaataacatctgtttttacagtcctttcatgttaaactttataagaatttattataaacagctttattgacagttcaatcctatttctaaaaggatttattttcccccaatggtaagagttttcttttcttaaacctaactagttgcagatatttcagatactacatttctcattgtgtaaggtaaagtttctgaccacctgaatatgacttgtagctcctgagaacaatttgtttagtaccgatatcatgcagtgacattggtacaaaggaattttctttatttcactgtactgttttcagttttattctatagttgttaaataagaccattaaatatttttattagtcttatttcctgtttaactaggtgggtttttgatctctgttcagtaaagcattgtgctcttcagagcaagcaattgaaaagcaaatagtgagtatttctactgtaaaagtttaacattaaaagatatacacacagccaggcaaggtggctcacgactgtaatcccagcaatttgggaggctaaggcaggagaatcgcttgagcccaggagttcgagaccagtctgggaaccatagcaagactccgtctctaccaaaaaaattttttaaaaaatagttggatgtggtggaacacctctgtaatcccagctactcaggacgctgaggcaggaggattgcttgagcctgggaggtcaaggctgcaaggctgcagggagctgtgactatgctactgtactccagtctaggtgacagaatgagaccctctctctctcaattaaaaaaaaaaaaacaagatacacacacatatatttgcgtaggtaactctaatttcatttcaagtatgttatgtaacaaccatttgtgtagtgcttgtaacagtcaatatgtaaatactgactcatcttctttgacaattctacctagatacttattagagtcccccttagtcattgaaaggaaggttaaaatcaaaagacgttgtttgccaaagtaatgaaagaaaacttataaacacaatgtatcatgtctggggctgaactaaaacccttctgatatgtggtattaacagatcatctttcatgacagtaccagttattagaaataaaatgattggagttattattaatactaacaatagtggtattcttaaaatgacttccttatttatcttcacctttatacattctactactgcttcaagacccatcttgaattcttcttccacagaacattctgcattaatttcagccaacattgatttctctttttaaaatttgtcttgcacagtgaattagaaaaccaggaattggaaaaccagaaaagcttattaagtaagaagcagagaggagagagtttcaacaaagggccattctaaagtggtctactgcggacaccatactgattatagttggtgattaaatcttatctttccaactgattataaactcctccagggcatactcttatattccacaagatgcttatctgggtgcagagcatgcatgcagttggtatttgctgatttatcaactaactaaatcttaacatattattattaacaatttaaaataaagttaaatgtatcactctccacccctcaaagccatttctgttctttgttttcatagcaccattattatttcctgcatagtattttttaaaaaccgtatttttaaaatttatatatttgtttatttgggtatacttcactagattgtaagcgtcacaaaagcagaactattataaccccagccactaacacaatgcctaacaaatagtaggttctcaatatttgttgaatgaatgacctacagatattacttcattatgaaagattttgctaagttgttttacatctattttatccaaaactaaagttcttgaggcaaagcctagaatatcttctatgttctcacaatgctctgaatcagtgcttctcttaatatgcatagcaattgcctggagagcttgttaaaacatagattacttagccccaaccccagagatgctgattcagtaggtcccaggtgatgctgctgctgtcagtctctggcgcacactttgagtagtagggctctaggatgttatatgtacagacacatgctgaatagtgggctatgtgcttacttgctggctaaataataaatgttctcactgagtcatagaactttgaaatttgcaaggacttttgctattatctagtctatggatagcaaataacctgataccgtgctatagtgcttgactgcatttaacctgcagaatcctcatgagcagcccagcaccatcactccaagtgaaactactctcttcttgaggttgtccaattctatcaattaaagatgaaaaccaggttctgagagttgaaatctctggacttcaaaggtccaacagcccaggtcttctcaattctcgttagtgtttcagcagctgaatacaaatttattaagctgtatcagagtagtatctgtcaaattggagtgtccataatatgcttaaacagagaactccattccaataacatgaactttccttatgctttattcatcatcgcttgaaattttgaattttgcccaaagaagtttataccagtacatgttaaattacatcatagccttctttgtataaatcttagagtagtttactgaagtacatcgcaaagttttgttgtttcttaggtgattttaattatgtatgtttactttcagtaatgcatcttttctccttcatcaatattatgttatgctagctgtaagtacaaaataattgagaacaaattatgacaaattgaaccaagccacaaaaaaaggagaaaccaaatacttttgtgatttgagcttttttcagtccttgaaactttaagaatatctgtctttattaacttttgctttttgctgatggtttctctcattttattatagcttatagcattgtaaattaatttaacatgaaaggataaaaacgttgcttttgaaatgtttctcattaaattatgaaaaaatattacactaaataaaagaaaggaatgcctctggtaccagcttctgtttgctcaattattgcagtacccaaagtgaattattacacagttaactcagaggcaatattattgtcattatattataaaatagatgagttgcaatcttcaaaaaaaaaaaacagcataggtcctttgaaagtgaaataccttttttccttgtgcttcatttaaatatatactgaccccagttttgtttttgtttttcctttttagagttcttgctaatgatgggcccaaagttatattaagaactgcaaagtaaatttcaaccaattactttattcaggggagtcattaaattgaggtacctctgaaattttggaaggaatgtactgccaattagccgaaagcactactcaatgtcctttctatggttataatctctctagtgtatttttaattgaagacaacctctatagaggaggtgagaagttgctatttattggtacttgttaggatggaatcaagggtgtggaagatattcatctatttctctctccagctcccccacacaaaaagaatggtgcttaatccatctgaagcatttggggagcgagggtaaagatgtaatatttaccatgagccgaaacagatcttcagaagtggaaaatggaagcatattgaagtccctcaactaaacagactttcttccatatggaattcaatgcattaatgttttcaaattctatagcttcaaattcttaatattttcaaattatgtgagcttatgtcaaaacatttaagtgagcttttaacaatgaggcaaatatttgaatcatttgtctacataacaaatactactataaagcatattaaatgttataaaaatcctaatatactaatgtaagctattataaagtacaaataattaaacaatatttatatgatcaatgttttataatacgataaacacattaaataattaaaaactcttccaccgtgcaaaaatgactaaataaattgttaatttctaaggctttttgagattactgtgaaagggggtatagtttcaggaaaggtgaaacttcccttcaatgtgtaaaccattaaagaacataataacctactgagtgtgggtctcaatgatatgccctggaaagtatgggcaactactccacacccaattttgtctttatatgataaggcacagcaaataattataatgcaatggataaatggtaaatcccaccaaagattaaccaatcagagcaggatgaaaattctgagtttggaaatctattggaagatttacagattagattaaagtgcccagtaaccaaactatcaaaattatatggcttcagttaattaatgatttccaaggtttttagtatactgtattacaaaacacattaagcatcttaagcattcaaacaacatttttttgatgattcagaaagcatcacaaattgttatatcagctgataataacttaggtacatatcaattaaacttgtattatagacacgcagaattcttcagaccagaagtcgaaagggcttctctagtttgtttatgctaagttgtttagagatgacataactctgagctaatttgtctattgcaatggttctcaaaatggggggcgggggatatttttacctccaccaagtggacatttagcaatatctggaggcatttttaattattattactggattggagatacaactgaagtctagtgggtagaggccagatatggtataaaatatcctacaatgcataggatagccctccacaaggaattatttaggccaaaatgtcagtagtataaaaattgagaaatgctagtctaatatagtgtttactcacctttcctgaaactatgtcccctttcacagtaatctcaaaaagctttagaaattaaaaaatcgtttagtcatttttgcatggtggaagagcttttaattatttagtgtgttttatcttatgaaatgttgataatataaatattgtttaattatttgaactttataagagcttatattagtatattaattaggattttatttaacatttaatatgctttacaataatattcattatatagacaaacgttttatttttttcactttaacaatgatttttaactctaattacataagaaaaagtatgagttaacaattttttaaattacatgcttggtttgagggccaaatacacatgaaaatgtggactaaaatttaaaatcaaataaaatctataaagtcgaggaaaaagctacttttatgacgaggcatggggaattcttcatagtttttgggttttatcagaagttagctattttttttctttttgctctgtaaacaatcagataagagaggctcaaatgacattttcaagtacatcttaacaaaatacactttgagcatcaattgagtaaagtttcattcttttgaaactttggttttcacaagatttcctgagagttttattttattggtgttctgtgggacttgggcatcataattcttacaaactactcagctcaatctaatgtgcagcgaagctctgggaacttttgttttgtctagtatccagttggaagattctatagctacagagcttgggtttaaaccccctccaagtctttaccagctacctttatgaccctggcaaattacttaaactgtgtgccaccattttctcctctgtaatacggaggcaataaaaatttccacttttagattttctatatgcggtttacaaattgacttactctgaagatcatctggagtaaaatctggagaaatatgatcccttataacttcttcaaccctttatatatttcaacatgagtaaccaatgctctaaatatggatataaattataagaataaaaaatctaggactattataatggtctaaactctcttcatagctaaaagtgttgagtaattaaaccagttgagcagctaaatcatgtacacacttctttgatccctcccacgatcatgtatttggcattgtaatgaaaagatatgtttattttcgagaatagacataactacctttaataatatgatcacccagaaatttttacaaacccctggaaaatttcatgaatatcaggctgtgctcataaaaccttagagatgagatcacaatagactgggtcaacatatagtaatgagcaggattaataaaacctcagatgggcatttacaaatgagtcaaaaccatgagtataattaaataattgtagcaaaaaaagagccttgggtaatcctttcagcaaacgtaatcgaagtgattgcatttagaagacaaatatttaatttggtgactagaaggtcttttattattccattatgtctttgtgtgtgtgtgtgtgtgagacacttttcaaggtcaatttttacttataaattgtctctaattaaaaattgacttggttattaaatcattgaaaattggccatcatcaaattcctcattaaaatatttctatgtgccatatatatatatatatatatatagaatatatatgtagaatatatgtatacatttatttttactttttttttactgtgcctactagagaaatttaaactacatatatgtagaatatatgtatgttttaactagacatactgttaagtacactatacctaatatttggcaatattaataccatctcattgagaaacctggaatatatgcacattttggatgtctattatatgttgggcactggactagtcattgataatacagagattagtaagactcaggttgacttcagccatgttgtcaggaagcacacactctagtttgggacagcgaggagaaattcaataagagaaatatatataaggcataatgctctaggagaatatgcagtggataactgcccaataggaccaggcaaggctttttagaggaggaggtggcatttgagtcaagtgttaaaggctgaatggaaattcactggttgagataaactccttaggaggaactactttaatagaacttgccgttagtcctgaaataaatggtgtgcaaaatcattaccatctgtcaattcactcagtctactttgctcttaacttcagaaaaaaatcagaaatacaattaaaacatttgagcctattttactgtcttttaaaatgagttaattcaaagaggaaattaaatataatgagagagaatctcccccgaggattgggggctggggaaatgctattgattctttgcttgtgtttattttctctcaaaaatacattatgcataaacttgatgatcaaaaattcagattattacatttctaaattggcaatgcaatttattgcatcatacatcaatcacaaaaatgctcatcttgctgactttcataaacttctaaatgaacaaaaatgcaaaaatagtttatactatattacactatagtagatttgttaaactaaaccagaacaatggtccatgaaaaataggcctctgactccaaacgctcacaccacaggatctctctgagatttttgtgtcatttcaagtcagagaaaattgtctaataaattgttggcttgtaacaatgaaaactaagatatctgtggggctattcttgttctcttcattttactacagcagctctgcccagtagaaataaaatgtgagccacatatgtaatttaaatttctctagtaggcacactgaaaaaataaaaataaagaagtgaaattaatttcaacagtatgttgtatataacccaatatacccaaaacattgtcattttaacatgtaattgttacaaaagttattaattagattttttccgttaagtatttaaaatctggtaagttttactcttacagcgcaactcagttcagatcagccacatttcaagtgctcagtagccatatgtgtctagtggttaccatattagaaagtagtttgagagatccacattaaaccaaaaggaaaagaacttccggcccttcactgatgagtcactcttcactgctaaccttggaagcattcccaaatgtagtctacagagtttaaatagtctatcttaacatctctcagggcttcagtcttaatgccatagtatttttaaagaatggtggatattcttttttacagaacactctgtaagagcaattagaagtttatgatgcacgtaatgcaaaatacaggtcatttcccaagcctattttaaaagcgcaaaaactgtagtcatttatcacccctgagaatgttgtcttaaatgtcttggtttggatattggtgatgtgagaactttgtgataagaaagtagtctttaagaataagatatcagactaaaattcatatctagaatgaaagtcttgtttttaatggaagattaagagcaagtctgattcagatcatgcatggggtacactagtctaggaaaacactagtctgaaaatatactaaaagttacttcgcaacttaacaagaaaatgtcttgtgggtgatgtcgttcttgatttttaggcaaacctacctacctttgcaaagcagctgggacctttttgcattggaagaatcatttggagcacaaacaaaattagattatcaacactttggaaaacaactacgaatgagcaatcagaaacctgaccttaagattacttgtgaattgtgaatcagcaaaataaactcgattgttcattgctaagtgtatttcaattatcaagggccttctagattataagtagtcttttttttttacttagtttacaattaagatgtgtggtatttgaaatacatttgccacagggagaaatataaattataattaatttcctaggctaattcaatttatgacatacctatatacattatctgtcatctataatttttcccttattgtttacttcccactggaagaatgaaaatggaatattattacatggcacatggcttgatacttttacaaactctgacaattatgtatttattttgggaggcattgagtttatttgttttatttatataaatttatgaggtacaagtataattttgttacatgcatagattgtgtaatggtcacgtcaggccttttagggtatccatcaccttaataagatgcattgtacccattaagtaatttctcactctcataaaattctaattatgtgaatttaatttaatctatttaatgtgttttaggcaaatatagccggtactataaacagttgattttaagatatcattgcttacattgagactaagtaaaacaaaatgggtcaataaatgtcaatctagataacaatgtcaactaaataagaggtcaaacatggcagtatttttgaaggtgatctgtgaaagtgattatagcgtttacactcatggaaaatgccttcagagtttcaactaagaatgccaacagctcattcctttatcctgatgcatattgtcttccttctcacccccagttccttcttcccctaacccctacccgctttcctttgctgattttgacagaaataggacccccaataagtcagggagatagcaggaaatgggataggatagaacccggaatgatagaatagctgagcctgaaggcatgaagaaaggctcctcctgacatctaaatggagacctaagagatgggttggtcaggtagggggaaggaaacatgaggagtattctctaagccaggcaacatactgtgcacaagtctgaagtcatgggaaagtgattttgagaggattgctgcttggtaaacctagagtttgaattgggagagatgaagctagaaagttagtaagggtcagattttttttttttttacttgcatgacaatggtaaaaaccactaaaggttctgtgttaagcagaggagtgacttcatttaaaaaggtaaattggattgaaatgaagggcataaactgaggcaaaaatatccttcgttaagttattgaagcccagttgaacacactggtggcttaaactggagtattggtataagtgggggaaagaggttaatagattccaagttgaaaaaaaaaaaaaaaaacatagactttgctatctagtaatggattaatatacaaaaggaaaaagtaaagtttctactttttggacagctagaaaccttcaccgaagtagggaacccaagacttagattatgttgggaggggcagggtattttagttgcacagggatttgctttacagaaatgactgaatgacaatatagagagatcaattccattaaaagaagtttgattactcacagttctcaagggaagagtacatactacgccatgcaaagccatgcaggaaaaaagttccagagtcggtcagcaggcagaaaaggaaagcacagcccaaaccctttattgtggtttccaaggaaaagaaatgagtgaggtagaataggcaagtctgagcaagtttaggactggatagttcaaataatttccaaaatttcctggctgtaaaagtggtctctggttgtctggtaccaagccctagggtgaggggaaaaagttagggtgggggaaatattggtttggtgtaacaacagttagatgaagaaggtagttggggatacggactttggattagttggtttgtataacgaaaagcaatccaacaaatccacaagggagcaagtttacaagttatttgctatctttaggaattagctagccctgggaggggcagtctctccctggccttccaaggacctcaagatgttcaagcatccataaaatatggaaattttttaaaaacattataaatacacagagtaaacgctgggcatgatataggacagtggttctcaaactttagctccactggaatctcctggaaaacttgttaatatgcagatgaccgttttacccttaagcttctaattggggaggtctggggagggcacagataatttgcatttctacaaagttcttccatgattttgatgccgctggtgagggaccaggctttgagaacactgatttaggacgtgtcctgtttagggaatatccaaaaggcggacaagttcagggaatattcttgggcagttggctgtgtgagtctgaaattcaggatagaatattaagctgaaataaagatttgggagcttatctacagtcaaatgataattgaaatactgagagtacggggggagagaggtccatgtaccaagaaaagtgaaaatgactaatcccaagcctcgctgaccattgagaatggagctaagtgagaggagttaacaaagctgacccagaaaaagtcataagggccttaggaggccaaggaaaaaaaatacattcactgccaacgagaggcacttacgaatggcttgactggctttgccagcatgcatgaactgcttcataattatttgtattgattacagtaacagatacatattttaacaagcaacttaagtaatacaactgatttttaattatcttgtttaaattgataaaggttgtatatattcatggtgtacaacatgatgttttgatatacccatacattgtggaatggctaaatcaagccaattatcgtatgcattacctcacatacactttatttgtggtgagaacacttagagtatactcttagcaagtatcaagtatataatacattgctgttaactatagtatccatgttgtacaataggtctcttgaacatactcctcctgtctaattgaaattgtgtttccttcgaacaactgatttttttaaataaaaaacttaatacctgtaagttagaattcttaatggtcaccttaggagcctatacaattattcctacgttgttgttactattctgtgtctttttcttttttaacatctttaaaggtatcaaatttttatattttgaaagtagaatttattttttgtcagtctaaaatatttttatgttgaacaaaatgcatgaatggtaaacctagatgcaatcaatttttcaaataaaaaaagtagatacccatgaacatttcttttgtaattgcaaactgtcttgaaaggcagtttcaaaaagagtttagttcctaaattgtaccattactcactgcgttaaaatgcaacattcatttgagcgtataaccttttgatcaatttgtttttgatgtcttgttccctgagagttgtctcaaatagatacatataaatatacacatatctcagattggctctgagaaatgtcttgattcaaacgttcttgattctaagattcatggtacataggaactgtatggtgacaaccttgtcagcctatctttagagtagctttggattctattcagaacatttcccaaagctattctgctatcaagaatataaacaggaatagtcaagggaagctttttaaagggcaacattttcatgtaggcatttttctcacattgaaaactagtttactaaatgcagtgtattaccttctcattacaagaagtctttcacattagtataaatgcatatggcagttgtgccagaaataaattgcctctcaaactagcacatggaaagaagaattctgagatttagcacatatgtagcttttaaatagtatactctgtttcaaacattatgtgttagtccacgttctcttcagccattttcagttgcatttttactttatattcctttgtatatttatctttgctaatcattgtcctgagattcctttagctcttgaattctacgtttttaattaatagaaaactttctttttatttttcccccgacatagttgttttctagaaagaaacagttataggttataaatccaacactttagggccgacttgaacatgcatcaaagctactagaggacttgtagaaatacagattgaatggtcccatgcctagagttttacattcagttacagatagggtaggacctgagaattcacattgctcacaaatttccagttgattttgatggcattggtctagagaccaaaccctgagaaccattaaaaaacaaacaaacaaaaacaaacaaaccaaaaaaaaaactatatacagagattttcttcattggcttttgccactgaagacatttagatgaagagactccacaaagtgtaatcatttagttatgagaggggcctgataatttgcatttctatcaaattcccaggggatactattgttgctgattgagaaccacacttggtgaaacactaattaaaataccattaaaaagcaaaaacaatttaggccagcaaaacctcctaaagaatgaggcctaaagacttattttgttttatttttgccagaagcttcttatgggcaaaattatcaccaacagagctgaggttcaaacttgtgttcatagcaagcaaaagggataatttggaaaaaaagctgaggttagctttgtggttggtttgggagtgggaatgagtagggaggaagaaatttaaaaaaaaaaaaaaaaggaagaagccaaatattaaattgttcacagggcgaaaaaagagaaaaggagtaactagaaatatcttagactggttcggcaagtcgggtccctcgcagctaacagtggtcccaccctctggagtttatatgtttacattctttttttttttttttttttttttgagacagggtctcactctgttgcctaggctggagtgcaatggtatgatcacagctcactgcaacctccacctcctgggctcgggtgatccccccaacctcagcctcccaagtagcagagactacaggcaagtgccaccatgtccagctaattttttgtatttttttgcagagatggggtttcaccagttgcctaggctggtctcaatctcctaggctcaagtgatctgcccacctcagcctcccaaagtgctgggattacaggtgtgagccaccgcgcctcattggagtttgcattctagttgggaaaatagccaataaatttgtgacttattttcctttaaaaaaaaaacttattctggctattgtgtgactataggatatggaaggtgcaagagtatgaggctaacaccctgttctaaattccgtctcctctgagccttgttctgtcaagaatctcctccttctatactttttaagtcaccttcctactgatcctttgctgtcagcttaccactctggtacccttcattttaacaaacaaacaattgtccaagcttaccggtgctgctccttcacccctccacctgtacctagtgtcaattctctccctcttctgatggccaaactttgtgaaactgtagcacagctccatatgtgttcctgcaaaggacatgatctcattcctttttatggctgcagagtattccacagtgtatatgtaccacattttctttatccagtctatcactgatgggcatttgggttgattccatgtctttgctattgtgaatagtgctgcagtgaacatacgtgtgcatgtatctttaaaatagaatggtttatattcctttgggtatataaccaataatgggattgctgggtcaaatggtatttctggttctagatctttgaggagctggaagccattatcctcagcaaactaacacaggaacagaaaagcaaatatcacatgttctcacttaaaagtgggagctgaacaatgagaacacatggactcatggaggggaacaacacacactgaggcctgtcggggggtggggcgaggggagggagagcattgggaaaaatagctaatgcatgctgggcttaatatctaggtgatgggcaatagcaaagacttggaaccaacccaaatgtccaacaatgatagactggattgagaaaatgtggcacatatacaccatggaatactatgcagccataaaaaaggatgagttcatgtcctttgtagggacatggatgaagctggaaaccatcattctcagcaaactatggcaaggacaaaaaaccaaacaccacatgttctcactcacaggtgggaattgaacaatgagaacacatggacacaggaaggggaacatcacacaccagggcctgttgtggggtcgggggaggggggagggatagcatttggagatacacctaatgttaactgacgagttactgggtgcagcacaccaacatggcacatgtatacatatgtaactaaccttcacgttgtgcatatggaccctaaaacttaaagtataataataaaatatatatatatatatctctaggtgatgggttaataggtgcagcaaaccaccatggcacatgtttacctatgtaacaaacctgcacatcctgcacatgtaccacggaacttaaaataaaaattaatcatagaactttaaaaaaagaaaagaaaatgtagcagagctgcctagctcaccttctttacccacagctcacttttcagtccatttatctggctattactcctaccgtgccaggcaaactgctctcactaagaaaatcaatagcctaccccctgccaaattgcctgactcagcttctccttgtaattttctcctttagttctctaacaccctcttccccaggttttcacctgacctgtctccataggacatttgagtctctttcctgatgattcatcctcagcctcttccataataagtatggctgctccccagatcctaccctcagcacttcttcactttccatgccacatctcttctgtgatctcatcttcatccacggctctaattagtatctataagcagatgactctcaaagcatatgctgcctatgtacccctcttggccattctacattgacatctgcaactccccagtgaacttctatatttagaccacaggactggtacctgctgataagcacaggtagggtgtactgagtagtgttttctctatttggttgggcttttgctaaagcagttgtcaaatattttgagtcttactcatggccacagacattttaacattagcatgtcccaaactgaaatcccctactgcctctattctctatttcagaagatggcaccaccatctacccaattatttaagctagaaacttctgattctggtgagacttctctcttttatgcatatgtctacactgacacaaaagactgcaaattttacctcctaagtctgtcttaaagcagatttttctctatgattctctatggtttcaggcccttatcactgtgaagtcaagcatacctgattcgaatcttgtcaccgttggcaaatttttaaatctcttctagcctcagtttcctcataaagttttctgtttcttagggtgactaaagggcttaaatgagattaccatacagagagtaaggtacataaaatgcaattaataaagaatagtcactataactgctgatgatgatgctattactattcgtatcctagaaaactccggtaacttgttcactggtctttctgcatctagcatcacttcctcagccagagttatcttctgacatgaaggctgatgccgtcacccccatactcatgtttgaaattcttcaatacctttaagataaattcccacctccttggtgtagcatgcaaggtcacacatgacataatctctccaaggccccatttcttccactctccttgagtgatatatgtggcagaaaatttaaggctgcctggatattatccaccttacgtcccaatacttccatctgccgcaaagaccttctacccaacttcccatcctcaacgaattcttattctttctttaaaaataacctcaaacttcagactagacctctggtccatagggcattacaaatctctcagtaagttgtacaggatgaacacgccccctaaaactttgtttcagatatttcaatttttattttattttattattattatactttaagttttagggtacatgtgcacaatgtgcaggttagttacatatgtatacatgtgccagatatttcagtgttaaaggtttaataatcacatttacagaaaaggaattagctacaaaatggtggcactggtatacaagtatgtaaagatacagtgcttacaatttaggattattgttgtcgatgttttaatattaaaatggctaatcatacagcaaagtcgaaagaaatttacggtcaacatctgtatacccagcacctatactttgccattgaaattttactatacttgatttattacatattcatctatccatccctctttctgtgatcaatttttaatattctaatactcttacccttaaataataagttatcttttcaaaaaataatgtgtttttacatagatgaagcaaaataaacttgcccttgataaaacaatatgcactgtagtgccttctaattcagtgcattgaagtatccattaacaatataaccagagaatataaaacatgtttattaatattccactgtacctgattagatatagaccattaggaagagttattataattaagaatctaggtttgtcaatatagaaaaaaacctgtgttttttatcccactggaatgtcttgtgaggaatattgttcccctttttctaaaatttaactttgacctttattttgttaatgcaccatgggttaagccacactacgacatgtgctaaatagacctggaagttttcaaactaggtttttaaagtgtatttgacattaaatcttcataacaccttattgattaatttaaatccattaccatggtaaggaaaattcgcagacaggcaggtgaaaattaaaatagaaacaaaacaacatggtaagcaatccttccccccaagccaatcagcatgtagtcagtgtgtccttttaaattagcaaggcgcagcttcccataaagtcccagcttgattttatatgctgcaatagtattgctaaaataaaggagaaggcaacttttctctataatttttttctagaagttttcacgcagcttagtatactgcaatgaccacattactcagttccagaattagcagcattccattgtgaatgacttaattcacattgtgattactcatttaacaacattcttgagggtttacaatgtgcaaagcattacattaagtcgtgtgtggcagaggttctcaaatgcagatgatctgtgaagaagatttcctcaataagcagagaaatgagaactataaggacagaaagagagagagagagaaagagaaattatttaagcttgtagcttgtcatcctcctttcttaggacagcctaccatttaggctgagactatgtctttctgattatttcttgtggttgaaataccccttccttaacaatatgatggtaacagtggatggtaaatcttgttttgttttaatagtttacctggcaaaagtatcattttatgtctgtatcagttatatataatagtatatcagtccattaccaaaccgcctcaaaactcagtagcttaaaacagtaggtacttcttgagttcactaatttgtgggctgatggtttacattgggtagtttatctgctctgactgggctcccttgggaatctggagggtagctgagagcttaagtgtctgaaagtggctgggtcaacacagctctatcgctcacatcttgaacatccctccagcaggctaaccagcccgagcaagtcctttttgtgaaggctgaggtgaagagtggaagtgcaaacatgtaaacaatttgttgagcccctgcttccattaagcctgcaatatccgattggctaaagcaagttttatttccccctgtggtaggcagaatcatgggcccctcgaagatgttaatccccagaacctgtgaatatgctgtgctccctggcagtagggaattaatattccagacggaattaaggttgctaagcaggtgactttgagatggggagattttatggactattcagatgggcctaatctaaccacagggttcatataagtgaaaatggaagcaggagagtgggagtcagagagatgaagatagcccctgctggctttgaagatagagaaaggggccattagccaaacaatgttggtagcatctaatgctggaaaaggcagggaaatagattgtcctctaagcttcttcagaaggagtatagccctgccaacactttcattttaatccatgaaacccatttcaaacttctgacttccaaaactataagataatcaatttgtgttgttttaggccagtaagtttatggaaaattgtcacagaagcaataggaaacaaatatacgctccattgttcaatcttttgaataacacatatactattatttacttaatgtttttcttaaaatcagctcattttgttttctgcttttagccttaagtgataattcccacaaaactgtagtctgatgttgcagtgtttttttccttaatacagataaaactaaatgaatattaaaatttaaactataagctgtttatctgtgtaacatggtaaattggctccctaccactactgttcagcaaaccacattttgggaaacagcgatttaggtggttcaaaggagcaagtgattgtgcaagaacaagaatttattagagaaagaagcatttggccaatgggtagaattgttggcagacaaaggtagaagagaaagacaaattattcagtatggctctagcgaactctttgcacttttatcacacaatctgaagcttgctaatcttgacatgtcttaatgttgttggattgctcattaaactggctgaaatgttcacaaagactctcacctgtcttctggcttaagctgagatttatcacacttcttggaaacatcttctggtctccagatctccctcagctaagctatacagtcagtctgttctgtaagaaagcccaaacttctctgcagtgttcctcagtctttttgatatcatgatgaacagattaagttgatgtgttcatcatgatatcaggtaagctggccgaagactctaagctgcctaaccatcccagggctgagagggatcgatatctgaagtacctataacccaatcagggcatgtgccttagcatacccattggaaagccctgttttagagcctttatcagctgtgaacttattgaaggcaatgattttgtcctgttaatcattctattcataattttcaacaagatacgtggttgttgttaataataattgttggttgaaatgaagttaaataaatagcaattgacttttccaaggtgacgcattgcacagatttatttatcttccctttgctgccctggagtaccagttgtatctaccaataagcttcatttataggccagcctcatcttagtttctgaattagtctaagtggctctggtagcgcatcaaaaatcttgctttctgatggtctttgtaatttgaattctgtgacttacagacttggtattcaatatgtcaggaataaacctggggtgtgcccaaatggtttgaaaaatcccagccttcctgatttcctctcttctctttctcccctggccaccctaatagtctgatagtttttgttatttggatactcctaaactcttggcaatttttcttacatctgttctctacaggctgtcacaagtgagtggaggcaggatggcatgggctgcagtggaaagaccaagaaaataagttaaaagccctgggttccagtaaatgctctgtagtgggatttagggcaagtctcttaacttctctcagcatcaatctccgcatctgtgaaataagattaatgacacctgtcttgcctatacttcaaggttgttttgaggttcacatgcattttccaccccatatagcctataaatctctgatgcctacagataacctataatgttctccagtaagtttaatatttccaggattttaaaactcaatgactagcactgctctgatctaacataacatattgtgtcaatatgtgtgggagtctctctggttgatgttaatggaagtttgtatagtttacctaaaatagaataaagctataatattaatatatatcatcgatgtgttttaggtgatttttttcaatataaaggcaattttggttcaaaattaggtagaacatttaatttttactaatttacaaataaaatgataacatcaaaagggccccttcttttaaagataagttgtaactctcacattgatagtaatctgtcatttaggacagggaatccatgtagtttgaaaattcattggcatcatggagctaaaacagtggctttttaaacatgtcgatttcagttttctttgttttacaagtcaagtagtgatattactgggtacatatgaagcatactgattgaccaaaaaatagtaacaaattttgtaaacccttcacttaaccattattcacctttcccagccacataagaatcctttctctttgtccttagattaattgcctttctttaaccttttcaattctaagtccagacaagctgctgtggttctttaaaaggccacacaaaataagtattgtccagtgctaacactctgaaatgtgatattgtaattactaccaagtgaacattaatcactactagattagaatggaattacctgttatattcacattaatagcaaatgagctttccctgattgatgttgttataatgaatacaaaaggaattaatagtgatctggcactcaccaaaagaggggtagtcattaaggacatgccatcaaaaggcgggtaatactttacaaaaaacaagtattaattaaagtaatatcacaacgaatgcctattgaataacttatatccacattacaaagatattatatggttgcgattaatgtgattgcaatacattttgtaaaaattaataatgactaaccctttaaaatatttaggaagcagatatttgtttatatttgctaaatagctatgccaactctttagcttttgtgagtgacttctagcataggaacagtgatggataatatgaagcactatatataataactcatcggccgggcgcggtggctcacgcctgtaatcccagcactttgggaggccgaggcgggcggatcacgaggtcaggagatcgacaccatcctggctaacacggtgaaaccctgtctctactaaaaacacaaaaaattagccgggcgtggtggtgggcgcctgtagtcccactactcaggaggcagagcttgcagtgagccaagattgcaccactgcactccagcctgggtgacagagtgagactctgtcaaaaaaaaacaacctcatatatttttacttgaaaacatacattttgcctttaggatttttacttgttagaatatcctaaaggacctataattgtaaatgtaaaattgactaatttctgggttttaaaaaaaagtatttgaaagctgatctgctgtgaacattgaaccagatgttaagaaaaatgctagtaagaaatgagacttgggagcaaagaagcagaactaaacttttcatatatggtttctatggagtaattgagaacgtacatattaacagggatacaaagtcaggccctctcattcaagatgctttctgtctttaaaaaaaaaaaaaagtaatttttgaaattttctgtggcaacagtcccatagcagaaagcaaagagttttgaattaagtgatcagaatatcattcttataattttactacactgaacattatttagaaaattttgaatgatattaaaaccgctataaaacatacttgcctaccataagacttaggatttaagccagattaaaataaatatttatttagaaggatgtatgtaagaactggtgaaatataaatgaggtctgtatttgagttaatagtattgtgccaatgtcagtttcctagctttgatgataatgtactatgggtatttaaaatgctatcattgggagaagctgggtaaaaggtgcgtgagaagtctctgtactatatttgcaagttttgtggtcttaaaccatttcaaagtaaagttattttagaaaatatctaaatatatattttagaaagtattatctttttctctgtaactagtggctaattagctcagtctgaaagagtatgtagaggtggaactgctaaatatatttctgatctagacttacttgatgatgcttgaattagtaagtgaatgttatgtgccaacatatgctatgatacatataaatatataagattaaatgataggagctaattatttcttggcatgttgcagtgggtccatttaaaactgtttatgtaggaaactactgtaattataaaaatgagcacagcccaacagcccagtatattagttgaaatataaaaggcgttgtgtccaagatttgaaatgccttacaataagcttggcacttacttaccttcacacaaagcagacacattttattgtgattttagtgttccatattatatggtacagtaccaaaggaaaactctaaaatatgtactcaaaatcctgatgtgcccttctttccaaacaggtggcaccacaatgaatataacctttagagttaatatctgaggacaaacccagcagttacaccagcatgatttaggtcctgctgttacaattattattattgtatttatttcacaattaagttgcagagttgagctcgatatagttccagctgtggcttttttttcaactgtctcaatagttcatagatatggccaaatgttcaataatagtgaaagcttatagtccacatattatttctgtagcaccaattttatgtgaaaaaatgatttatctaaatctcagagaatttccataactagttttgttatacatctacaaaactaagttaaaagaacagagcagactttttaaatagctagattggccaaatccacctcattatcatcaagaagatactgaaacaccgtgtttatacaacaagaccaggcattgtaaaagaggaggaaaggtagagacaaaatttatttagccctcaggaatctttcattctgatagtgtaaatttgacaactttagagggacttattaacatgtatcttatatatcttgataccgaatatatattttgtgattgcattagagccatgaaatattacacaggtcatttgaacatagcattttcatagagaaggtgacatttgcaaaagattaggagaaaagtaactacgattagaaaatcgtagttttattttgtctcttgagaatgaattgatgttaattttatgtctgatttggccaaatacgatgtggaatttgctaaagactgaaaaaagaagagacatcaaatagagggttgcaagttaacagaccatgttataattaaatgagggaaaaaaaagtagagttgttaaactcccagagaagtcatttccccttggtttggtgcatttcactttggtggtgaagtaaatgaccatatgggcacttttctagctctgtccgcaggtagcactgggtatttgtggacaaattacctagcttttcatagcactagtttccttgttgatagacttcagaattctaaattccattttacatccttatttctatgtttaacttaaagataatcctttgcagccgggcacagtggctcacacctgtaatcccagcactttgggaggccgaggcaggcggatcacgaggtcaggagatcgagaccatcctggctaacatggtgaaaccccatctctactgaaaatacaaaaaatcagccgggtgttgtggtgggcgcctgtggtcccagctactcaggaggctgaggcaggaggatggcatgaatccgggaggtggagcttgcggtgagccgagatcgagtcactgcactccagcccgggcaacagagccagactctgcctcaaaaaaaaaaaaaaacaaaaaaaaaaacaaacagatcatcctttgcactggaattatcctgcagtggaggatagtaatgaaagtgtagactctgtttctgaacactagctatgtcactttcaaactgtgtgattttccttcaagtttctcaatcactccaggtctggtttctaaatagaggaataggagtagagattaatattgtgaagattaaatgagaaaacttatataaagcacttagtacggtgccctgcatattgtgaaggcttggtatgttgttagtagattcattttattatcattattaataatactgaaccctggctgttgggggaattggttctatcctcctgtctcatagtcaaaataggttaaagggccttctatctcttatttctggtggtgcattataattactaatagtaatgtgcttcatttgtatatgatcctttatagtttacatggcgctgttttatgtaatcttactaaaatttcaaaaataattttaaaaagccagaattcacaagaatgtgactcggagaagaagtagatgtttttctaagtagatctttcagtttaactgattcaaattttctcatgtttcatatacatgattatcatgtcttttgataaacagaatgttaaccagagtacaaccttgtatgaacatatttattcagcttagaaaagatccagaggtacaaaatctagatcccagtgtagaagttagcatacacagtacaatttctagtatgtccataaacaatatgttaaagtattagtttgagccatataggattgccaatatctgagtgttatagagctacaaaattagtaggaaattttgttgctttaacctaatcattaaattagaattgtgtgacttaaagttacaaatggtttccgaatattttgcagtaaaaaagtagtgaggaaaataaatataaatactaaactagacctgggaaatttaaggctataaagaattctagcttacagagagaggagtctttgtttgcaacctcccactagctaaatttaaattatcacaaatttcatcctctcctttacttaacccttgactcatgcaactagtcaaatgtctttttcttgctaattttttctttccatagatcacttatagggagttctggttaaaaatgatgtctctttaaccttcactaaaatgagaataggggaattaaaatgatatttaccacaaagagaaaaaaatctgggaggaaaaacaataaaataaaaaagataaaaaatttaggaatatgcagagaatggaggagttagcatatcttggaaacctgaattccaagtacttagaacttgggaagtcctagaaatgtgaagcaccagctactgcagaaggcagagatgaatgtgaggtaagatagtgagactgtgaagagaaatcattcagtaaaaaatgcattatcaagccaactgccactggtctagtggagtttaatcccactggggaaattctaaatggattgaagacatgtgtttaagagttagttattctttcaaaggggcaagggagctggggtatttatacacaaaatcctgctagtcattggtttaggactgcttccaacgggggaattattttcctagcatttctggcataccaccttggcaagaaaaattattttgtgtccagagtatgtctaaagccattagggaaaaaaaatgtggatcctcatagttgaaagccaggccagtctgcactaaagtggtaaggatgttttcttttagagatacaggtctaagaaagaaatctgaaggtggttacctcttatgcaagaatttaatttgatggattcaaggtgtgttggttaagagaaatggggaagggttgcttctcatgactgcggcacgattctactatactaaatttttcttttattaagcagcattgccttatgcaatgataggaaacatttgttatatgtgaaatcacttttatttttattttttaatctattcctattcttttcatttttttaacttttattttaggtttgtggggtacatgtgaaggtttattacataggcaaaccggtgtcacaggggtccgttttacattttatttcaccaccgaggtattaagccaactactcagtagttatcttttctgctcctctctctcctcccggcatctcttttaaaagaaaataatttttagcaattctttagaataagtcttggccacctaaaggtttccaggactctagttcagggagtatttatctaagtcagtagttcttaacctgatataatttcatccccagagaacatttgacagtatctcaagaaattcttggttgtcacattgggggcggggatactgctgtcatcaagtgggcagaggccagggatgctgctcaacatgttgtaatgcacaagacagccccccacaacaaagaattatttggtccaatatgtcagtagtgccaagtttcagacatcctgctctaaatcaggactgtgatgtgaattctctgcgatgatgaagatattttatatccgtgatgtgcagtactgtagcatatggctactgagcaattgaaatatagctagtgtgactgtacaccaggtgtgatgttccataccgaggaaagaagtagaaataagatatagtctttgaagtcagagctcacaatctagtagcggagacagatttttaaaaattacaatattttaaaaatattgcaatagaacatggtaatgttagaagattaataacatgctaaatttgaggcatcaggactcagacagacaattaaaaattctctgaggtgaatttccacccttagctcagaatactgtaatgtttaaaagctgttttctatacacacacacacacacacacacacacacacacacacacacccctttaaatcttttatcatgtaactcattgcttcttattttacccttttgtcagagaatacatataaaatactggaatctgatgggacattctactttatttaacaatgctattgagtttctcaaaatagtttcctaagaaagtctattaaagtattgattttttcataaaggataatacaaatggcatgagtctgtttaacattttaatcaagcttaaaattagtcttgcatttgaaacaaacttgcccagagaaattgttgagaaacttaagagaaaaacatcataaaaaattgatgggccagccaggctgtgagaatattaaaatccaaatctaaattatggttaaccattgtcacatctttctttgaagcttaagtaactcgatattccctgtaggatacccagtgattcaaagtgacacatatactgtcagctcattttccttcccagcatgctggtacaatttgtatccatagaaatatatggaaaaacctattagtcttgagtgccagaacctaccaaaaggaatctttgtcatctacaaataaattaataacataagataaacaatcctattaagttatactggcccgaaaagggaaaaaagaccagtttatgaattgacaaaagaaggtaaatgagattagccatatagcaaccactcagataataatgtgttttctctgtttagtaaaaaagcatatttgagagaaaattttcccttatagaacaattcttaataatatacatagatactcctttcctgggatgtagagtttaatcctcccctaagcccctccatgaacttggtaacttacttccagataatagaatatggaaaagtaggaataacaatggagaagaaaccaggcaggcaccaagttaactaagtagtcaagtataacatcgccagtgataataatattgatatcatgtctcctgtgatatgatgtcatgaaaaggacatgttatctctctggtattcttccccaaaacctgtaacttcttctaatagggaaaatacttcagtcaaatcttaagagacttctagaatatacctgactagtcctattcaaaagtttcaaggtcatgaagaacaagaagaaactgagagactgtcacagactagaggagaccaaaaagacccaaggaccaaatgcagtaggagattctggattggatcctgaaacagaaaaatgacatgagtggaaaaactggtgaaatctgaataaagtctgtagttttgttaatagtgttgtatcagtgtttgtttaaatgtttagataaatctctcatgcgtacagaagagttatcattaggggaagctgtgtgtcaggcacttagaaaactttcagatacataggtaccttttgtaagtaaaataatgaattaatgggtcattttatgtctgtattttatataaggctacatttctaaagagacaaaattgtgagtcccataaaaatataaaatgaatatgtgtaaaacattttattagatcattaactgatgaaggaattagtaagatgttagttacagttggttcaaaggagagtctgaagaattggcatatatatatacgtatatatacgtatatatacgtatatacatatatatacgtatatacgtatatatacgtatatacatatatgtgtatatatatattttatatatatacacatatatatataaaaaacactctagaatgctgataggaattttataacagatacaatactgatcactaactgtagggcaggaatctattgcgttccatgagaaaattttactggcatctagtgaacaagaatcatttgtgtcaccatcagccctccacaaattgacttttaaacgtacagaattgcaaaatagcataaccaaagtctaaggtacagactcttagataatcagataactcctaaggttttcctaaggaattaaagggaaagagacattctcagattaaggaaaacaaagaatttcttgctagcaaatctgctcttaaagaatgacaaaaagacattctctaaacagaaaggaaattataacgaagtcttgacatttcagaaagaaaatagtagaatgggtaaaaatgagagtaaaataatagactatcctatttaccataagtttgaagtgaaaactttaacaccacctgatgtggttctcaatgtatgtagagaaaatacttaagagttatattttaaaagaagacatacctaagtggaagtaagagtccttctacacgtcacctgaagtcaattccagtagattgcaatgttaatgcgtatcgtaatgcctggaaagaccactaaaaaactatacaaagtgatacgttaagaaaatacaacaaataaattttgatggaatcttaagaaatgttcaaataacccacaagaaggtaagaaaaaagaaagagaagaatgagaaataaagaaaacaaacagaaaccaaataaggtggcagattgaagccctaatatatccataattaccttaaatgcaaatggtctaaatataccaattaaaagagatttagctgagtggattgataaaagctgagcacacaatatgccgtctaaaagaagtttatttcaaatacaacctaggtaggttaaaattaaaagaatcgaaaaagttacattatgcaacaattaatcaaaagaaagcagcagcagtaatgttaatatcagataaagtaggcttcattgcaaagaaaattactagtgacaaacagggacattacataaagattaagtgttaattcactgggaagacataataatcctaaatgtgtttgcacctaacaacagagcttccaaatacatgaagcaaaaatgaatagagctgaaaaaagaaacagacaaatccatatttctagttagggacttcaacactcctctctcttcagttgatagaactactaaatggaaaataagcaagggtaaagagaactgaacaacaccatcaaccaataggatctaattgaagcactcctcccaacagtagcagaatacacattactttaaagctctcatgaaacattcactgatataagccatattctggactccaagcaacttcagcaaatttagagaattcaacttatatgttcccagaacataatgaaaccaagctagaaatcaataagagaaagacaaaagaaaaacctcaaaacacttggaaatgaagcagcacacctttaaatcattttccccaggtcaaggaggaggttgcaaagaaaaattttttaaacacaaagaactaaataaaatgaaaataaaacatcaacatgagtgagattctgaagcaaagggcaagcatatctactgtctatttttaaagattaagcttccttaagctcagggtttctctcctgtgatgcaatccactgtgtgtacaggtgtctcctgaacttctttgggattactctgtgggaactggctcaataaaatgttggttctttgactactgctttgctgtgagtaatctagtctttttctctggcaaaaaaaaataaagtgagatgtcataaaagcagtattgagaataaaatgtatagcattagattatttagttagaagacaggaaaggtctaaaataaataaatgagcctagagacaaaaaccatcaacaaaatattaaataacatgcgtcaaagtttaaaaaaagagtgtcataccataactaactgggatttagtattgaaggctggctcaacatttgaaagttaattagtgtaatctaccatatcaacaaactaaagaagaaaaaatcatatgattatattgattgatgcagaagcatctgacaacacccagcatccattcatgataaaaactatgagaaaactgggaatagaggataacttccacatcttaataaagggtatctacagaaaactacagttaatagcataattttaataatggaaggcttaatgtttccacccatgattgctaattagggaaggatgcccaatttcactactcttttttaacatagttctggaagttccagacactacaataaagcaaggaaaaacaataaagcatgcatattgaaaagtataaaataaaattatttctatttgtggatggcatgactgtgtacgtagaaaatatcaaatattctacaaaaacaaaagcaaaaataaccaaaaatgctcatggagctgagaagagaggttaacaagatccaaaaatacaagatcaacacaccaaagctagtcacatttttatatacagatgctcctcatcttatgatgggcttacatttagataaacccatcataaagtcaaaaaatcataaggcaagccatcacaacttacggattatctatgttggaaatgaagatgtgaaaagtgaaattaaaaacacaacaccatttataattgcttatccaaaaatgaaatacgtaggtataaatctatcatacatgtacaggatcggtatgtagaaaattataaaatgctgatgaaaggcattaaaaacaacctaaataagtggattatatggcatgtttatagactggaagagtcagcatagcaaatatgtcagttcttctcaaatcaatctaaaggtttaatttagtttctatcaaaatcttatcaaggatttctgtacacatagacaagcatactctaaaatctataagaaaagtcacaggccacagaataactaaaacagtcttttaaaaaggtaaataaagtgggagtaacctctctacccaatattatggctaacaatatagtaaggctatcaatacagtatgatgttgctggagggatagactcatagaccaaatgaaacagaatagagaacccaaaaacagacccatgcaaatgtgcccaacagatttttgataaagttgcaaaagcaattcaatagagaaagctcaccttttcaacaaatggtcctgcagaaattggacatccctagagtgggaaaaaaaaagaacttcaacctaaatctcacaccttgtaaaaacttaattcaaaatagatcatggacttaaatgtaaaacataaaactatcaaaatttagggaaaaatgagaaaatcttcaggctctagggctagaattggcattgaaagcatgatccacacacagaaaaaaatcagttggactgcatcaagatttaaaacctttgcactgcaaaagacctgtgagggaggatgaaaagacaagctacagactgatagaaaatattttcaagccatatagccaaaagatggatgtctagaatatataaagaactctcaaaactgcaaggtaaaacaagaaacaaacaatgcaattaggaaatgggcaagacacatcaagaaacgtttcaccaaaaaggatatacagatagcaaataggtgcatgaaaagattatcaaaaacattagccattagagaaatgcaaattaaaattattatatattcctacacatctatcagaatggctaaaacaaagtagttacaacaccagatgctagcaaggatgtggagaaaatggatcattcacatattgctggtggaaatgtaaaatggtacagccactgtagcaaactgtttatcaattttctgtaaaactaaacatgcagctaccatacaacccagcaattgcactcttggacatttatcttacaacctgtacaaaaatattcataccaccattattcattatagccaaaaactggaaagaacccagacggtcaacaatgaatggttgtacaaactacggtacatccatacataccaggcaatactattcagcaataaaatggaatgaaatatttatacatgcaacaacttttagatcaatctccacagaattatgctgagtaaaaacagctcatctgaaaaggttacataatgaatgattctgtttatatagccgtcttgaagtgacagaattaaagaatgaagaacagattggtgattgcaaggagtccgggacaacaggggaaagagagagagagagatggatgtgactccaaaagggcaacacaggaggcatccttgtagtgttggaactgttctttaccttgattgtgtcaatgtcaatatcctggttatgatattgtactatatttttgcaaggttttaccttcagggagacggggtcaggggtatactggttttctctgtattatttctcacaactacatgtgaacatacaattatctcaaaactaaaagtgtaatttcaaaaaacaaataaaacaattcagaaattttaagacttcaacagtcatttatctcatttgttattttactgttgagaaaacaggcacaaagaaactgaagtgacttactttcatgcttcacctaagtctttttttcttttctccatcactcagttaagagcttctgtaatacagaaagtatgtcttgtattcttttaactcccatattacttcaagcaatgttgaacacatgttaacattgtaaaagttgttgtctgagtaaatgggaaagatagaggtctatgtctatatgcaaatactttgtattaacatgtttcagtctgatataactttccacacagaaagtacaaaagaagatctgttcaagttatctgatttaattaagatagtaaaaagaaagctgataatttagggggtcttatttgattgtttttaattttacttattttccactaggtgatcattttgatgattcaaaaatgaaaatttacaaaaaggtataaaataaaaattatttctcctacctctatgcactgtcgaatcaattcccctacccaccaccaatcagtattgtcagctgtttgtatatccttcaggagatatgtacgaatttcaagcgaatatgcataagtttatgttatgtatatgtgtgtgtctgttttctatatatatgcatctttacattaatggtagcatacgatacacattttcttctgaattatgcttctctctcaacaatgtttcttggacattttcctgtatcagtacataaagaatgtatttgtttcctatgactgcaatagtgaaataccacaaactggatgacttaaccaaaagaagtctgttgtcttacagttctggaggatagaagtctgagatcaaggtgtcaggagggttggttccttctgagggctcggaaggagaatctgttccattccattcccctagtttctgatggtttgttggcaatctttggtgctccttgtcctgtagatgtctgccttcattttcacatggcatgccccctgtgtacgtgtctgtctccaacttccccttttaaggacagagtcatattggactcaggcccaaccaaatgacctcattttaagttgattatctctgtaatgaccctatctccaaatagggtcacattctgaggtaccaggggttaggacttcaacatttaaatttggagaaaatttggacagaattcaacccatagcaaagaacttaaccgttagtttaatgactacatattgttccattttgtggatgtatcataatctatttaagcagtgctctgaacattttattggttttcactttcattgttttgccttaatattggtgtctgtttcatagaatagatttatagtattttaggcttatcaagattttatttaaatcttggaatttaaattccctgtaaatttcaagtgccttgaaggcaagatatattgaggaggggagacttttaaagttcatatgaaataataaataatcgcaagtatctcaggaatgcatgaaaaataataaatgtctctgcatcaataataagggagggggcttgccttatccaatattaaacttgctgtaaagctactgtaatccaaatagtatagtattagcacaaaacaagacaagtagatcactgaagcaaaattgagagtccagaagcagatcagattgtttttggaggccgggcatggtggcttacgcctgtaatcccagcactttgggagtctgaggtgggtggattacctgaggagttcaagaccagcctagccaacttggtgaaaccccgtctctactaaaaatacaaaaattagctgggcgtggtggtgggcgcctgtagtcccagctacttgggaggctgaggcaggagaatcgcttgaacccaggaggcggaggttgcagtgagccaagatcgcaccattgtactccagcctgggcaacaagagcgaaactccatctcaaaaaataaataaataaataaataaatagatacaaattgtttttggaaacattatatggcaaatgtgttattttaattcaaggaataaaggtgttttattcaataaatggtgccagcactctttgcaattcctcttagaaaacacagattgcctcctagcttatgcaatgtaagaatacatttcaaatgcattaaagttttaaatgtaaaaacaaaaattcttggaatgaggaagacgttttctaaacaagacacaaaactcaaaagctataaggaaaaaatataccttgttactgcttaaaataacagaagacaaagtcaaaagaaaaacagcaaatagagtagatgtattcgcaacatgtgacataaagagatgcatatacctaatatacaaatttctcctacaaatttgttaattaaattaatattttttaaaattcaaacaacccagtacaaaactggccgaagtataggaatatgcaattcccagaagaggatatccagatagctggaaaaataaaactatgataatatgcttcctcatagtagtaagggataggaaaataaagaaataagacaccatgtctatctaacaaatagacagaaattaagaatgataatttttaatggaagagagcactctcagatattgcagatgaaacgcaaattgctgtggtctttgaggaaagaaatgtggtatgatctacaaaaattttaaatgcacttaccttttgatcagtcactccatttctgagaatcaatactacagaaataaaagtaccagtatgaaaggctgtatgtagaggatgtgtattttggcattgtctatgatggtcaaaaagtagaaatcaagcaaatacccttcagtgtggaaattattgaatatgttatggaattatttgggcatcccagaatgaattattatttagtctagttagagctgtgtctactgtcctgaaagaatggtgatgatatctttcaaaaatcaaaacaagtttcaattaacatattccatttttaaaataaaaaagataaaattaatcttatgggattacataaccatgaaggaggaatggagagatatatactaggttatcagtatttgttaccttggattttcaaaggagaatgaaagaggaacaaataatgtatcaagtttcacaaaaagtgaaaaggtggaatataaatattactgcaaatatataaccattgaatatgtatatggacaaggacgataagataatatagaaaactgaatatgttggttttattatgaggtggttggattgaagatatttttgtctccaaatactgttgttttaatatgttgtgttttacaaagaaacatgggctgagcagacagggaagccctgataagcatagtacctgccatgtggccattcaataaatgatagttattgattattattattagagttgtagtacagtagtgcctaccttaatatatttagattgatgcccagcagcattgagttaacccgcattttaaggacaagtgttatagctattatatactaatggtaaacttgagtctgtaactagcactgttgaaggaggacaacagagtaatatgatgtgtattggcctggggatggaagggtggtgcttaaggcacagcagattttcactccagccaggtttccttaggacctctccaatgaacaggatacctcccttcctgttctttctaccctcccaccccgttttttgctttttcagtttcagcccaaaggggaaggaagtatgatgactgactccccatcagtccctgaggtgaactgggattttgggagagtgtggcagctgcaaatttggcttcctggagataggatttttgccctcaatctggagaaagttcctgaggctacagctgttcaagcttgtgaagtaggaactttgatcccttttttcaaaagttttgtataattagcatccaacttgttagacagtatgtggctcattacaagattgccacaaattcatgctgggccgtgtctaagaacagggcaaagggagcctttggaaagtgttatacagttgaccctcaaacaatgtgagggttaggggcgctgagcccaacacattgaaaaatctaagtagaacttttcactcccccaaaacgtaactactaataggctactgttgacagaagccatactgataacataaagagtgattagcgtatactttgcattgttatatgtaatatatactgtattcttgcaataaagtaagttagagaaaatacgatgttactaagaaaatcataaggaagagaaaaatatatttactattaattaagtggaagtggatcatcatataggtcttcattctcattatcttcacgttaagtaggctgaggaggtggagggagaggaggggttggtcttgctgccaatctaaatgctgggcccagccaatgggtataagttttaagtgtgcacatattggtgaacccttacagatcacggcactgtctgttcgagtgtctattttgaaatgtccctatccgtaatataagttgcaaaggagtttgtgggcccactgaattctaccaccctgatcattgtgaagcccattcagctttgtgaagagcttatcttggtactaccttagccaaggtatgataactcagacataatgtcttttctttcatggttccttttttagtgatcatagattcagttctgtaataattagagatttatgtgtcctattagtaattgcatcattctttaaagacagtgtcaaccttgctatacagtgtgattgaagccttgacataacttgggggtttgttggcattttgaaatcccaggccccacttcaaaactgttgaatcagaatctgcattgtaagaagatccccaaaagatctgcatgcacaagccttgaaagagaagagaagccatctaacattcctcacctaagatttgaagaatttcccacttatgcaagagtaggggtgtgatttctcaggcaggatatctaacagaaaacaacacttatgaagtgtttcctgtaggagctaagcaggtggccagaaaatggcaggctacaaaggagaagaatgactaggaacctgagcaaggagaaagtctcaaagacaaggaagtggctggcagtgtcagggactaccaggcagctgaaaaagctaggtgtgaacactatttcttggagttttcagcaagtaagaggttcatgatgatgcctcaaagaatttacagtggaaccagagccaagaagtcttattgtggtgagttgggaattagggaaagtgttatacagttgaccctcaaacagtgtgagggttcggggcgctgagccctaacctcaagtaagaggttcatgatgatgcaatcaaagaatttacactggaaccagagccaagaagtctttttttttttttttttttttttttgagacggagtttcgctctgtcgcccaggctggagtgcagtggcgcgatctcgactcactgcaagctccgcctcccgggttcacgccattctcctgcctcagcctcccgtgtagctgggactacaggcgcgcgccaccatgcccagctaatttttgtatttttagtagagacggggtttcaccgtgttagccaggatggtctcgatctcctgacctcgtgatccgcccgtctcggcctcccaaagtgctgggattacaggcgtgagccaccgcgcccggcagccaagaagtcttatggtggtgagttgagaagtagggaggtggaaataaggaatggagatgaagacatgaaaggaatttgagaaatgaggcaatagctagagaagaatataggaatacacagatccagcaacccagcaagggaagggctagattctgatttcatgagcaaattgcctactaattaaattcacaatatcagaggaaactgttggactcacttactgaataatagctgaaaagtatctttgctttatagagagatcactgtagatgaaagtcatcttccagtggtgagatattcttcagtgtcatctcttcatttttatttctaatttttcttaatttgaattatttcttctgataatgggaatgatgtggtaattttgtctctcctgtaaattattttaaagatttgtacgaactcctttggcaggcttgagtgtgttgtgacagcttggcttagatatgcattgaatgtcattgaattcaaactccttaccaacatagttagatagcccataggcattctacttgaccctttcaaggagatctggagatgcaattgtaggggaaaaaagaagaaaagaattcaagaagcaacaaagtgaaagataatttggcttgcagaagagaggtctttctatcacagtaataataatgccaattatatgtccatatatatatatacgcacacatatatatagtatatatatatacacatataactcagacataattctttcatagttctttcttttgtgcacagattcacttctgttataattacatacttatgtgacctatttgttagtaattgcttcagtttcttaaaagagcatcaccttgctgtgcaaagtgtgattgaagcctcaacatctcttgggagtttttttagaattttgaaatcccaggccccacttcagaactgttgaatcagaatccgccattgtaagacaatccccaagggatctgcacgcacgttgcagcttgagaagcactgcagtatcacacatatacacacatattcaacaccaaagagagagaaagaggtcataagctctcaggtggagactagttccatgtatatatgcatagagagaagaacaaactctaccttccagcaacgtaaaattctactcaatcatgtattcaccaaaaaagaaaaggctttctccatataatgtgtattattcatatattggcactcttcagagctcttcattccaccctaatgttatctttcttagataattcacatgacactttgttatcttccaataatttctgtcattgttataagcgaaattattcaggctttatctaagagagtaaatcaaacagtatgcctctctcattccaattctgcaatattttcattctagaatgtctaaaggagccttgaaagagaggagaagtcacctaaggccagctagaggggatatatagcagggaatggtggcaactccactcctcgtagcccagtggggttttttttttttccaatctgtatttgtatgtgagtatcacgtctatgccgattttatgtgtacatatgtaactcaaatctgttcattgtgctagttagaatcttatttccccctcttctactacactctaccctttctctttcccctcctttggcaaccaagacactgagttattaataagcagattggagcaaacattttgatgcactattgtttgatagatttgttggttcattcaataagcattaattgagcacttgctaagtgttaaacaatgtactaattgctagatttaaggatgaaaatgataaaacccttggcctctagagcctagagtgtagttggggagacaaatgggcaaattagtcacacgacaacatattccttgttaaaacagacagttgtgcataagtctgtatacccagactggagatgactctgtttccaatgttgccctgggaaacctcatgatcagtttaataatgatgtttggggtgagaggatactgagacagtttgcttctagcatagtaattacccatagaagtttggggtctttattcaaaagagtttacaggccacatgagccactgtcttgccttttataggatcacatctaagttccgtgtcatataatggccttggccttcttggctttctctgtgctctttgcctgccaataccctaattattgaagtactgtctcccgcagctcctcaaccatgagctgttcccgatcctcccagcagctatgtttctcctttcttcaaacctctttagctttttatttgtactttatttgtactaaattgtatttagagctttggagaacattcttcatagttgtaattagactgtaaagtcctgagaatgtatttttcatcttcgtagccccctgcagtatctagcagaatgcctttaaacaaatgggcagtaaataaatcccaacaaacttaaattaaatttctccaaattgcatatttaattttatagtggcatttactgataacatacattgaaataaaggccagagcataatcctctctgtttctgaatattatttatttaaatattaactttctaatccaattaggtctttcaatgacactttagatctaaatttatttttgcattgttttaaatgtcatcaaatgattcatctcttgtgttttttaatatttttggaacgaacgtgtgaaaatgagcaagtgtcatcagaatatgatgcttgggtttttttaattcaacatttctttgatcatatatttaaagactttttctcaattcctttctggatgtggcctcacaaatcatttcagaagtcaatccatttcaagatttttttttttttttttgcttttttcacttcacaggaagtcaagttcattctttaaaatgtagcaaatgattaagcaaattcaacgaatgatcttcatcaactccgaggtgtttttcccccttgaaaaatttaagttactattatttttttttctttttttttttttttgatacagagtctcactctgttacccaggctagagtgcagtggtgtgatctcggctcactgcaagctccacctcctgggttcacgccattctcctgcctcagcctcccgagcagctggtaccacaggcgcctgccaccatgtctggctaattttgtgcatttttagtagagatggggtttctccttgttagccaggatggtctcgatctcctgacctcgtgatccacccacctcggcctcccaaagtgctgggattacaggcgtgagccactgcgcccggccaattattattattttttttaaacttcacctatcataaatcttttaaaatttcacctatgataaacttcctctgtcatctggggaattacttaaatgcaatgatggccttcaagtatactaccaggcagcctatccaaatcatgaaacagaaaggctcatagaccaaattaaaatacttgaatcacagagtttattaaaatcacagtgagaagcaaacgggaaagatatgtgctaagttaacacgcttagaatagagtgtaagcagactgtgaagattagagtacttgaattctgcagtacacaacattatatgtcttgtctgtctctgtattgcatcagccttcccaattatggtgtgcttacaaggaccaaagttgacttcccaacaagggagtccaaaatgggtggtgcctgattcagtggcatgtggtttatcagagacacagagacaagaatgcatggccacagctgtaacttgccaaaatagcctgatgactagccatgtaattctcaggcagaagacttacggtgctggaataggtatcacctatggatgcctgaattaagaccttgtgaacattaagtgctcatgtgtatttatttgatcttgaatatttagtgcctcttgtatatttggtctcatgtgtatttagcatattatgaatatttagtacccaggtgcctcatgaatattgggtatcttttggtccttctatccctcactatctatgtttagtacacacatgctctgcttgctaactacttatcttctaattaacacattccaagagccaattatgtgtatctctttccactgagttcttcattcaatgacatcaagttagttgcttgaaatcagctattgtgagagcacttacaccacagaaattggcaaatgctacaattagcgccactgccctcccctagagccagttatttgacatttactagcattccactacttacatggcccttcatgctctcactccgtgtgaccactcaagccttatccctctttactgaactctacaatcaaataaaatatctttgtttcttgcttctggccctccatcaaatggctccctctcctaggaacaatctgtctctcctctatcacctttgtttagctagttaataatcccttttcagacagcacctcataaatagattcctgaacatcccaaaccggatctcctgcaccttcaatgtgctacttcagtacatttgtcttaccctttgccatatggtatttcaattgcccatgaatttgtattcctgtttagatcttaagctttgtgaggtctttttgtacttttttgtacttccgtatacctaccacataataaatatttaatgaaagcattaatgaataagtaagtgaatggagtgagtgaatgagtattcaattatgattcatttgtatcaaagtgataacatatacttacagggaaaaggccagagggggaaaaaataaaaaataataatatattttatgtatgaccttgtgtggggaaaggaacatagggccactgcctggcctgcttcttttatgcaaatcctaatgtaaaatatgatcaacgcctggctgggcagaaatacaaaaacccagtactagtgattctcccaaccagataccagctagtacagatcatagccagatttaactactgtgaagtggttaggttagaggtgacctataaggaaatgacgctaatgatcattagcatcatcttggaagcttaaaaaaatgccccagctgtaccccaagccaatgatatcagacttttgtggggaacccagatatcattgtttttaatctttaatgattccaatttagccaaagttgagtctcaacaaaccaagttcttcttactctcatattctcttcttctcgcatagataagaattaacagccagctcttctacatgtttcttagacacatatattgtttcagtggtaattcgttaacagtgcatatgtcagcaaagcatgactgaaaaaaatatctgctcccacacattctgatcccatcttgacactgcatagctgttggcgaaggcaatttcaacaatgaagaagtgggagaaatgactacattttatgtaaatatgtattcattgaaaatcaaaaggacatatgtaatgatattgtttaagattctaaatgaaggacaatacttaagagtcctctgtagtcaaatttctcagcagtaaaaaaacattgtcttttctttacaactattaaccatatggctgtgaaaatgttattctacaagcctttaagatttgaaatctgactttatgttaatacacagaatttaccacacaatcctgtatgatttctaagtagatttaaagagtagctattgctcaccttttcaacataatggtaatgatggtgcaatgtcaattacatgatactctcatgggcgtgattatatgattgttaacacactgaagtgcttatatagacatagatactgatttttatatgtacatatttaaaacaaacaaggacttaaaatggcctgtaaaagtctttctagtcagtctttctggttttggacagagaacaaataatcccttacagctgttaggttggtgcaaaagtaattgtggtctttgccattgcttttaatggtaaaaaaaacgcaattacttttgcaccaacctaatagttatctacttccatctttaacgggccctacccaagactgcatggtatataagtaagaaatgtaaatgaaaatctcaaatgctagatctgcccaggaggggaccactaatgagagaggaaatgttaacgtcccatatgaactaagctcagcttagcatttacccttcctgctattccgctagagcagtgcttctcaaaagttgacctgtaatggaatcttctgaatgcctttttaaaacgtagctggctgggccccatccccagagtttctgtgtcagttggtctgggatggggcctgagaatttgcatctctaacaagttctcaggggatgttgccggcccttgaatcacaacttaaaaacctctgctctgaagaaagggaaagctctctctgctggatttccccaagcctttttcagattttcaggagacttctgtgcggtagcttgcttccttctttccatactactactactaccactactactactacaaatagcaacctctagcatattttcagtactaaatacccagcactatatatacatcacaaaagtcccttgaggaaggtggtattatcatctccattctgcggataaggaaatagataagaaatttgctgaagatcgcagagccaaatgagactcaaacccatgtaacccatgtctgtttgactttaaagcccggaatcttaatttgttccagacaagctcattatgtgctctgatcttcaccactgaaatgttctgaatatgaggctgagggcagcagtgaggttggaaggagcagcccagaggagcaggcactgtgctggtagaatagtagtatggtggggcctgcactccctaataaaagaaggggacaatgactatttcctccttctccaaggtcgtgctgcctcccatttctctgtctgcctggtaagaagcagctctgggccatgtgtggtggctcacacttgtaatcccagtgctttgggaggctgaggcgggaggatctcttgagcccaggaaattaagaccaaccctagcaatctagtgggacttcatctctaataaaaataaaaaacttagctgggtgtggtggcacacacctataatcccaactactcaggaggctgaggtgggaggattgcttgagcttgggaagtcgaagctgcagtgagccgtggtctcaccactgcactccagcttgggcagcagggtgagaccctgtctccagaaaaacaaaaagcagcagctctgaaaagaggatctagcagtttctatatgcaggagagcatttgcgcaattgttcctggggttgaatctgagaaactcacagtgcacattcagatactatttacaatcttctaggaatagtataaatattgtggccagggcaccttcatattgtgaaacacaaaaagacttcagaccttagattatgtgtcgaaagttaggcaccaatgatttttttttccatttgttcttaagtggcaaatctttacattaacatttttggtacttgtctttagggaaatttcttctctgttctgaatgtatatattgtaattcctcatttacaattttgcctgcaaatgcaagtgagtacagatcatccagttatgaaaatgctctgagatttgagtctagctgtttcagctttaagagccctgacctagactttgaaactgacatggttttatatgtatgtggttggaattaaacccaaagcacatcttttaaaactctgaggaacttctgtgccacagctttcgctcagttggtgagattttactttgaaatttaagggatgagtctagtttatatgcaaagaaatgtagggagctttgcaaacccaatcaaatcctttgtgaacagtgtgtgcatctgtttattttgctgtcattttgagtccatgatcctgtatactgttttgtgggcacatattgagggtaatatcaaataccatgtagaacagatgctgcaggtatcctttccatgtcctcttagctttggggtggtagatgggcacatggaccaagcccaaagtgacagggtattaacaggagcaagactcaaccaataagggagagtagatgggtacaaatctcagctttctctcccctcactgggataattttgagatatattccaaagatcctcagagcatccccaacagcattgagccccagttccccagattagtaatctactcaataaatacctcttttttttttttttttcccgagatggagtctcactctgcaccctggctggagtgcagtggcacaatctcagctcactgcaacctccacctcccgagttcaagtgattctcctgcctcagcctcttgagtagctgggactacaggcatgcgccaccacacccaactaatttttgtatttttagtagagatggggtttcaccatttggccaggctggtctagaactcctgatctcaagtgatccgcccgccttggcctcccaaagtcctgggattacaggcatgagccaccacgcccagcccaataaagaactctggattgtttcttccttttcctctcctcctttcctgttccctacagtgtttcctaggatcacctcagtctgctgtatgggaaacccagactgagtcaccataacagacagaggcattgttactttaggactttagtggatatagttacatgggagagagagactgtgtatgtatatataacctttataatattaaaccatgctatactcaaattatttactggccaagatttccaatataaattggaaataaattggatataaatcaagaacagttaaaattggaaatagttaaaatacaaataaaatagctaaaattgggcaaaatacctgacccaatgctttaatatccgattgcataattaaacgagtaaagaggaaaggaaattattagcaactctatatttaaatgcaactgacatccaaggaagtcatgaagaaaactctttgtgttgataaactgaaggcctcttctagcagacttctgtgtttattgttctgttgctgactattttattccaaacaaatgaacttgcttgtcattataccccacccttccctagtacagggcccccattctttgaaacagtaactcattcagttccaaggagaatatgaaaagggagggtaatatataaaagaactgaaatgaaaagtggcctaagtgtggcacatttccattgtggattccatggcaatggagaattgatggcagagcatggtgagagatgtgaagcatcaattggctgtatctccagggaattcctgaagttcagttgccaccctggagggtggcaaatgctctctctcaccttccttgagttattgcttagatgactcaaaacaaaaaactgatgagctataaatgggctgtattatttgtttttacctgctgagtagttcagatatttcaaaataatctcaaacttaacctatggtgtggtttctgtgttaaacaaaataccgtaacttttagttgaaaatactgtgtaagcccacacaatctcttgttcacagataatcttgttgtcaaacattcatgatgacaaaaactcataaacgattcttttaaatatcaagaataacttatgctgtaagtcataatttcataagcatgaatttatgaatgtgttttgtgtttgcaattttcatttaggttgtcttaaaatcatgcgttttagcttaacttaggagaaatatatcttttgtgacaacataggatattcagagaaacgtgaaaactaggtgatgtgttttatgaaagaaggcataaagtatatcaagcataagaactttgaattctatttgtgttttttgtggctttagaaaagattgttctgggaatagagaattccatttgggaaacctagcacatacacagtagcagagttaaaatactgacttggagggttcatttgaagaattctatagaatttttgcatgttgggaataggtttatattcttaaacattgcactcagggtttctattcaaagcaaaaataactttgcatagaccttggccattctttcacattctaaagtaatccatttttttttttcagggtagttgttctcagtcctgattttctgataattcagatcatctttaatttacaccaaaaacttttagaagagtcagataataatttaacataaaatgtaaatgactgaaatatacattttttaaaggagcagatatggaggggtccaatgtacttaactatttgctctctttgtctccttgcattcacgggaatgtttctatgtagttttctaatttcacacaatttcaataatccataccctcctcatttttatgggccttcatgatactaaaaatgttaccagaaattattttgtgttagtctctttgtttagcacattcatacataagttttaacatttaactggcatatttttaaagtaatacatgttttttttttaaaaaaaatcagttatgtttgtgtgtgtgcatattttcttttgtggccaaatgttgcacgccctagtccttctatttaaacaatgagtttacataacaaatgttacatgataaacatgaagacatttagtttgaaaaaaaatgattttctagtttactcatttaaaaaaagctgaagtaaccgggaagaggagtggcagaacatattagtctttttcataatgccatcattaaacaaagatacttaatttccaggcctggtgcagtggcgcagcctgtaatcccagtactttgggaggctgaggagggcagatcacttgaggtcaggagttcgagaccagctttgccaatatggtgaaaccctgtctcaaaaaaaaaaaaaaaagaaaaagaaaaagctacataatttccaaaatgacttcagtgggacctgaggtgagggaataaaggctctggagtaatttcactctctattcctctcctaattttttttctgttcctttataacaacattttcactacttttgagcttgggagttgaggaatcatgaccagaagaaaaggaaagacgggaaagatgttcaagggtgaggatgcttaagaatgacctggcaagcttatgaaaatgcagttgtctggatcccaccacagagattctgatttagcaggtctgtggcaaggcctgcgattctgcattgctaaccagctcccaggtgatgacactcatgctggcaacctatgaaccattgagtggcactgttccagggggcagggcaatgagaaattgaagtcaaaagccccaagacctggtgctacgaaaatactctggttccttccctctcaactgatttacttgtcggtgtgattttgcaaaaatccctgaacttcttaaatcccagttacctcacctgaaaagtatgagtgttgctccagatctggaggctttcagaccatgcaaatcgaattcaaaccatgcaaaccattcaagtcattctagaaagttctgcaaggtgcctcagaggccaaagggagagatgggaagagggattgaatgggctctttccaaggttccctaacccacttgaatactttcatcttttatctctttcatatattccacttttgagtatggtttcatttagaaaataggattttataccaacagatttaaagaaaaactccaagtctgaaaatgactcatttatttaaaactgtatagaacaaagacatttagtgcacaattccaaaaattctctgatccttccacagcatgcccagtatgctgcaagagtgccagcaaacacatgcttactgctcacaaatgtgaaatttaaccccatgcactaggaggtccctagtgtggggtggttttagctaaccagactaagagagtacagggcaacatcgagcctttctctgcggtcatgtctgattcattaaaaatccagctttccccgaagatatattaattaccttctgtttcagaatttgtttttagagcctaattcttaattatatctccagccattgtgtgatttgaccattttggaactaaaaagttatcctatgaaattccacctccaactattgccacactgttagtttgtctatttcatacaccatgccaatcttagcgtggtgctagcatttcattataaccagctttcatttttaataagaccatgtgtatatgaaattgtagacttcagtctttgtatgaattgaaagctattaatcttcccagggttaggttatgttaaacagattgtaatgttcttctttttattatgttatttaaatccccttcatttcatactgcaccaatacatttctactatcttggaataaattaattccagttacgtgatggaaaattttagtgtaaaaatataacctgcagtataattttttctgtcagaataccaactagaactggtatgtttcattctaattggaaatttgagttatcgctttgatttttaacagtgggaaaggaaaatgaagattgatatctttcaatagccgttcattcattcttcattccttcattcattcacgtattaagaatagtctatgtgctaagaacagaaagagtgttagagatatgaagattaataagaccagatccctgcctgcaggcatttcctattctatgtcatagatagggggctattctgtttagaggtaaagcatgacccacattgcctctgacaagaagcataatgtctgtagcagctaactgctggagacaggaggctagagggctgccctggtaattggtattcaagtcttcaagaaaggaaaccagctattccaaaatcagtgggcaagaggaagttgtaaagttaagtgaaatgactaaaatatgaataactaaaggttggaatctggtagaaggagaggagagcatcggtcagcaccttagtttgggaaggtggtgtggccatagtaggctttatttagaaagaagcaattcttaggtaccagctaggtttcagttccttaaggggagaaaactggcaaaatataggcaggtttccagggtgcaaagccacgttctagcttcagctcaggcaaggccctggggtatgaatcaccaccagagtagcccagccaaaatgactaagggatctaagctggttgctaatgaaagaggttgcagctcaaggcagctctgctgacgcccactggatactgggattacattgatttaacacatggaaaccacttaatatggtatgtggcacaacacaattaagtactcataaatatttgcagataatgctgctgccattgctgtttttgtcgttagaagactcgggaaaatcatctaatacaggaatccatctgttggcggggcttgggcttctaatatttgactggttgatttttgtcgacccaatcttaacaatattatacacagccattacttcaggaaaggcagttgtaaagaatggtataaatttcctgtaacttgactgccacattctagctgagtcacctctatatacctcagtttctttgtatccgcagtgaagattaatgacctcatagggttgttattagaatgaagtgaattactacactggacttatttaggacagtaactcgcacatagtgagtgctcaaggaaatctcagaccctgcctgctagtggagggtccagctcctgatacatttgggggcaggtttaaggagttcattgatttagagctgtaagggctgatctttcaccctgcatgtcttcagcaactgtggctggtaaagtccagagcagtcaaaggctgacaaatccttgttagaaatcacaaatgcccattctcacaacttctgtggtgttttccatcctttccctagaatactttctttttaaggcaaaggaaagaataatcactgcagatagcacacagtatttttttgcaacatattttcaaaaattatgatgagaaaagtgtatcattcctgtgaagaaacagcataaggaaaatgatttgagaaagaaacatggttcttaaactgaaacaagtgtcagaaggaatcccagaaggcagaaggaaatatagtaatcatgatgaagtctagagctcacaccggttaacagaatggcagcagcgatattcatctcacgcctcttccatgctgtccctgagtgagcttctgctgaattgcctggctggtgaggattggtttcagcagcagaaggaatgggctgccagctgaaggctctggttctgatcctgggtagggtcagagaaagcaagatgtgaccatcacttttgaccttggtcttgaatttgattccatggaacaacgatattttacaaacccagttgaaggtttatccctttttctattcaacacagggagagtccttagagccccaggaagacttagccctttttcattctaagagtaaaccacatctaggtttccagagatgaaaagaccaggctctgatcttccttctggaagcccttgcctattcaacaagcatgagtattaaatgctattgccttggaatcataattcagttttcacagtttgggctatgtcagaaccattcttgtcaaccccctgttttctgagaacccgaaacctgcttgtttagaattttagaatctacttgactcttacaggggagaaaagatctcttttctcacccatcgctaggttcatggctgaggcacctataatgaaggacaaatcaacaacataaaagcatgcgaatttatttaatataagtttcacatgacacaggagccttcagaaatgacccaaagaatcagggaaaagtgtgtatttttatgctctgatttgaggaaaagtagatgtccagtatgactggacaaaggggaatggtaataaactggggtgaccacagcaaggcctgtttctgcagaacctcctgtgtccctgtgttttcagaggtaaaaattttcctttccttccagtatagtaagggcacctctggtatgatagtctcatgacctgcttcaggggagaagggggaaggggaaggtgagagtgaccatcctgcttctgctgtcttctcaaataccaagctgccatattgtggattttggagtagcgtaacttgaatccttttttttttttttttttgagacggagtctcaccctgtaacccaggctggagtgcaatggcacaatctcggctcactacaacctccacctcccaagttcaagtgattctcctgcctcagcctcccgagtaactgggattacaggcacatgccaccatgcctggcaaattttttgtatctttagtagagatggggtttcaccatgttagccggactggtcttgaactcctgacctcgtggtccgcccacttcggcctcccaaagtgctgagccaccgcacccagccgcatagcttgaatcttatcaataccttaaccaaatgactctgacagttttcctcttcttatctaaattcttgagggtcacccacacttcccaatgtcttttgaaacttgacctcttttctgctgaattgaggaagatacctgatttctttaacctcaccaaattcctacttcttactgttgttcattgctggctgaaaatttactttggcgagttcaccaagaacatacttatcggttcactgtttatatttgcactcaagataacacttgaggccctgctactcaaagaatttagtgacaactttcttcatcactctcatatcttatctgtcatcaagtctttttttcctcgtaaaaatgcttttagctctttaagtatgtttcatatctataatagctaagataggctaacagctataatatattaaacatccaccaaatggactattaaaatgacttaaacaaaatagaaatgtatttctttctcatgtaaacagtctaaggtgaattcatgttagttggtgttggatgtgtgtgtgggaagggaggggtgacacccacataattattcaagaatacaggccaggccaggtgcagtggctcacacctgtaatcccagcactttgggaggccaaggtgggcggatcacctgaggtcaggagctcgagaccatcctggccaacatgatgaaaccccatctctactaaaaatacaaaaaatagctaggagtggtggtgggcacctgtaatcccagctacttgggaggctgaagcaggagaatcacttgaagccgggaggcggaggttgcagtgagacaagatcatgccactgcactccagcctggcgacagagcaagactctatctaaaaaaaataaaataaaataaaaataaaaaataaaaaataaattaaaaaaaaaacaggccagcaagggtcttccatctgcaatagccaattgccgaggttgccctcctgaagatattcagccagcccaaaggggaatgagctagaggactgcacacggaggcgtcccatgtcctttgactcaaccttctactggctagaactctgccctgtggccacatgtaacagcagaggggctggaaaatgaagtctagctagatacctaaaaagaagcagagaaaggtttcaagagcatttagcaaccatatccaccttattcatgccctgccctctattcgcagtggccccgcagcactgctcaactagcttgctgcattggcctcttatctcttatctattgccttagatccatctaaatgctctgctactcttatgcctggaatatgttttcaagatgtgactaatcctctcacagcttgaaggataaaaggtcaaactgctctggtgaatgcatgatgcctggtcacctctgtagccccatcttccctgacactttcacagacagtattccctttactccaacctgtgggagtattttctaattcacaataatagcaggaaatacaatgtggaccagacacagttctgagcagtatattaactcatgcatttcttacgataactttataaggttgacagtagtagtatccctatttcacagagaaggaaagagatacagataagtaatttacatatgatctcacagatagtaagtggtacagcttgagtgcatatgactcaaagggtagaggttctagattcttaatcactgtattgtactacttctcccaatgttatcgtacatgccattccgtcttcctggaatacccttcgtctttcttcatctaacttccactcaaactttaaggatcaatttaagcatgccttattttaggtagccatggttgacatcagcctaatttaattgctactcatctatgtccccatagcgtcctttgcattcctctatatctctctgctatagcagtaaatgtaccaccattccgtaaaatccttaagggaatgtttagttttatgttcccaatgccagcacaatgtccagaacagtgttgtcccatagaaatgagagccacctatgtaatcttaagtattctagtagccacgttctttaaaagtagaagtgaaactaatattttattgaccctgatatatccaacatattattatttcaatatgtaatcaataaaaagtattaataaaatttgctttttccattctaagtctttgaaatctggcatgtgtctttcaattgcatcccatctcaatttggacaccgtattttcattgaaaatatttggtctcacctgcacacgtatgtttattgcggcactatttacagtagcaaagacttggaaccaacccaaatgtccatcaatgatagaccggattaagaaaatgtggcacatatatatcatggaatactatgcagccataaagaggatgagttcaagtcctttgtagggacgtggatgaagctggaaaccatcattctgagcaaactatcacaaggacagaaaaccaaacaccacatgttcttactcacaggcgggaattgagcaatgagaacacttggacacagggtggggaacatcacacaccagggcctgtcgtggggtggggggaggggggagggatagcgttaggagatatacctaatgtaaatgacgagttaatgggtgcagcacaccaacatggcacatgtatacatatgtaacaaacccgcacgttgtgcacatgtgccctagaacttaaagtataataaaaaaaaaagaaaatatttggtctctatttacatttcataaactttatagttgaaaaaagaagattcacattcctaagttgttccaaacatacacaaaagtttttcaataactgaaccaagagtcaatttttaaatttatatttaaatttaataaaatggaataaaaatttgttaaacttcagtctctccgtctcactagcctgatttcaattgctcggtagctacctacagccagtggctcctgtgttagacagagcagcacagccctagaacacagtagatcctaaatcgatgtttattgaagaaattaatcaatgacagtgtagaaaatttgcagtgattatgtcagaatcaatagttctccacccattttctcccacactctcaaaagggccaagttttatatcaccaaatgatattcctcttacttctttctgagcagaaacagttttggaaattaagatctttttcaaattttccagactcggcattttagcagcgtttctatttgtaccaacaatgcctttctacctattttccttgcttcttaataagttaactttgtgcgaaggtcattttgtaggtcagtgtaatattgtgcattaagggcttctaagttttctggtattataagaactccttggtttccttctacttttcagaatggaaaatcctcagagcaattttcatctaaaagtgctgcatttaggttgtttcacaattccccaaccctgagtcaaatataggttggtgtatgagcagcagtgtctcttggctaatcaagagcgtctccttttgctacgctcagtgttagagaaatggagaaagtcagctgggtttagagattaggtgagagactcaggcatatcctttgataagtcataaatcatttcctgtttagaaaagcacatgtttagacacccataaaatctccaaatgaagggtgttttacttttccttcaaaatctcactgggaaaaggtacttctgactttccaagtgaataaaaataatgactcctgattaccatgtatgtttaaactgatttgcaaagcaagtgaaaaagagtctagtgagtagtgataagcatcttttagacatcagaagatgtactgatttaaaggtccgtatcattttataactagtatctattgagattcaaatggttattactctgtgtgaatctgtcttttctaattgtttttacttattttagaatatcgatttgtgaatattaaattcctaagttttccagcaatccagtgtttgttttggatatccagcctggatgcagaatagctgcagaaagttatcacaaattgatctctatattctgtttccgagtggcaattgtcaaaaatttggggtcatcggctacccctcccacccctaagaagttccttgtacttcctctttcaaaacactcacatcattgttcagtgcctcacttctctactaaaatgtaaccaaccacaaagatagggactatgtctttcctgtttactggtggattctcagtatctagcaccatgaccaatgttaatagacgttgaatcaattccagttgttacctcttcacactgggacaaaagtccttgcaagtattctgctgccatttgtatagattcaagccaaatatgtctcaaaacgatattacagatgatctcttcgttgttcctctgacaatttctttcccccctgcattgcttaacttgattgacaatgacccctactacttataacatgtgccttttaggtagtgcacttggcactacattttatgtgatagttttatgatgctaaagactatttgctgtgatgatgctgtgttctcacatggcatatccagatttatttatgctggtgaccaaaggcaggtagttaaccttgaaaataggttaaaatttgaaaggcagcaaatcttagggctagaatttataatttatctttaaggaatcttgaaaccaggtgtgaaggaagggacgtaggctagaagtacagaaacctgggttctgctccagcactgatgttaagagcaagttgcattgcttttctggaccttaattttctcttctggaaaatgaatagattaactggaacaaggaaggaaaatacgtgaatggcttccgtttctgtctcgtttacccctgaaagacatggctagtcagtcagctctgtatcagagcacttctcaaggcaatgctccaggtagctaccactcactaatgagagttagcacataggtaaaacctctttgtcatctctaggctacttcatgtttaagatactctccagctttaaaattctaataactctattagactgaaatttaagaatacgagaataatcatccctcaccatgaagagagagtctgaggaaaaaataatgagaacgaataacccttctcttttactacaattcaggactgccatgaagagccgtccagattgtgaaacatacaactcatgatgtgaatggtacttctttgtttttctcggtgtacaacttgcacagctgttcatggccctctgcttccacaaattcatttctaaatagctgtacctcagttctttgacttctagtatgtctaatttaatacacatttctagatttacgatatataagaaatatctccatgaaggaaaaatgtaatagcccatgcttttcattataatagaattttatgaaacaatgtcttttaaaaacagaaacatatgtactactacttcgcaggacattagcccttgtatataaatcaataatacaaaaaattcaaattaccaaggattagaaaagactgctgtgggatatcttctggtgcaagcatacagttatttatccatttctttcatgaatatttattgatgttccaaacattaggctagacactagagacacatcaataaataaaggaaataggtttgatctctatcttctttgatctgtagtttagtgggggaggaaggaaattaaacaagtaactactacaggttgaacatccctgatccaaaaacctgaaatccaaatgttccaaattccaaaactgtttgaatgctgacatgacatcacaaatggaaaactccacttctgacctcatgtgacaagtcacagtgaaaatgcaggcacaccacatagagtttattcagcatccccaagggaagaaagatcctctcagcccccgttagctgtgatatatcttttccacccacacccagattccatcatacaagcaaacccacaaaaggtacgaaaaatggcacatgtgcgggctagacgcgacaacggcaggtaccctacaatgtccagcatggggccaaaacctacgtgcattaatcactgtgtttgctggtatattctctggtggtgtcaagatattgttgaaaatgccctaaaggcctgcatgatatccatagggtaatgcaaatattccaaaacctgaaatttgaaatactttcagtcgcaagtattttggatatgagatattcaacctatagatggtaagggtattactatgatagtgctacgggtgtacatcaaggtaattgaccctggcttggcaggatgcagaaggctttcccaaggaagccttacctcagctgagacctgaagagaagcaggagttagacaggtcaagttggggatttggaggaggtggagtcccagcagatggaatactatgcataaaggcctggaagtgagaaagtcatgtcatgttatttcaagggactagaggaagcttagcaaactggaggcaagaagatagcttcagcacactattgaaattgtccaggtgagtaatgatgatagtgtaactaagttgtgatacctaggtatgtgagctgaacctatggagaaatgttctaggctagagaatctttaattggatatttaattatcagtatatacgtaattaaaaccttgcaagggtttgaaatggttcagagtaaagttcgtagatgagaagagggcctaggagtgaacccaggaaaatggcaaagtttcaggggtaaataaagaaaaataagctttcagtggagacagggaaatttgcagttcagtagataggagacagactaggttcgtgtgatgtcacagaatccaagggaagagaggttttcaagaaaaagtaacatttagaggtgtcaaatactacaaaagcatcatgaaagataagaccaaaatatatcctattaatttagcaacaaggaaggtattgacaacctttatgcaagtgatttcagtgttgattatggagaactcagtaattacttggtggtaactaaagaaccaagattgcagtacgttcaggcatgattgagaattgagaaagtgggggagcaagtgtaaaacaattattttaagacttttggctgcgatgggaagagagaaagggccatagtagcagaagatggatgtaggggcaggaagaacacactcttaaaagggtagtgacttacacatgtttaaatggcaatgagaagaagatggtagagagggagaggttgaggatgcaggagaaattagagataatcaatagcacaggtacttgagaaggcagaaagatgaaatttagaaattagcttcagataggaaggaaagtacagcttctattacaacatcaggggagaagggaaggaggatgggcatagctactggtagttttgtaagtttggtgaaaggttaagtaggattgttgtattggatttattttttattgaagtggaagctgcagctaaatgcccagtgatgaggaaggtgttggagtctgagatttaaggtgagtggcaatttgaaatagctgctctaggatcctatttaacagagaaaatgttgagtacacaatcagtgagcagttttaagtccactctattctgtttgcagtttcaagtacctttcattgcttctaagtttatgaaaactggttcacaatcttcttgtgcttcttatttctacctcttttccttctgttttctcacctccccagtttaaacagtcccgaattttttacaattaaatatacagcaactgccatgaaatctactgataaaagatactgcaaaatcagtttgggattgggttcattagcttacttattattatcaatcctaggccactaagcaaccttgcataaaatgcataaaatgaggagattctagtggaggatagttttcaattatctcattaatttcaggccatgtgactagtccaaatagatattataggccaagaagagcctatcttgagattttaactcccaggataggttttctacctgatcaaaagaatctaataactattcaatctcttcttaaatggtttggttttctgtgcaaacagttttacccttttagctgattttctaggtgttaaattaagaaaattctctcagatacttgttcatcatgtactaggatccctgatgtgttcagagttgtccaactttcaaagggctttgcattcagagtacctaatctaaaccctgatatcattcttttataacagaaaaccccggattagactgggacagtgtctgtcatgttcatcactgcatctccctcagtatttgtagaatgaatgaagggacaatggcaaactatagtcctaccatcacacttttggtagtgaggagaactgctgtaacttggaagattggagggggaaaaggtggctaaaacaatcatacagtaaactgggctgctatcaagagaaaccatttgtcaattttggcttttgttgccattgcttttggtgttttggacatgaagtccttgcccacgcctatgtcctgaatggtaatgcctaggttttcttctagggtttttatggttttaggtctaacgtttaaatctttaatccatcttgaattgatttttgtataaggtgtaaggaagggatccagtttcagctttctacatatggctagccagttttcccagcaccatttattaaatagggaatcctttccccattgcttgtttttctcaggtttgtcaaagatcagatagttgtagatatgcggcattatttctgagggctctgttctgttccattgatctatatctctgttttggtaccagtaccatgctgttttggttactgtagccttgtagtatagtttgaagtcaggtagtgtgatgcctccagctttgttcttttggcttaggattgacttggcgatgcgggctcttttttggttccatatgaactttaaagtagttttttccaattctgtgaagaaagtcattggtagcttgatggggatggcattgaatctgtaaattaccttgggcagtatggccattttcacgatattgattcttcctacccatgagcatggaatattcttccatttgtttgtgtcctcttttatttccttgagcagtggtttgtagttctccttgaagaggtccttcacatcccttgtaagttggattcctaggtattttattctctttgaagcaattgtgaatgggagttcactcatgatttggctctctgtttgtctgttgttggtgtataagaatgcttgtgattttagtacattgattttgtatcctgagactttgctgaagttgcttatcagcttaaggagattttgggctgagacgatggggttttctagataaacaatcatgtcgtctgcaaacagggacaatttgacttcctcttttcctaattgaataccctttatttccttctcctgcctgattgccctggccagaacttccaacactatgttgaataggagtggtgagagagggcatccctgtcttgtgccagtttttaaagggaatgcttccagtttttgcccattcagtatgatattggctgtgggtttgtcatagatagctcttattattttgaaatacgtcccatcaatacctaatttattgagagtttttagcatgaagggttgttgaattttgtcaaaggctttttctgcatctattgagataatcatgtggtttttgtctttggctctgtttatatgctggattacatttattgatttgcgtatattgaaccagccttgcatcccagggatgaagcccacttgatcatggtggataagctttttgatgtgctgctggattcggtttgccagtattttattgaggagttttgcatcaatgttcatcaaggatattggtctaaaattctcttttttggttgtgtctctgcccggctttggtatcagaatgatgctggcctcataaaatgagttagggaggattccctctttttctattgattggaatagtttcagaaggaatggtaccagttcctccttgtacctctggtagaattcggctgtgaatccatctggtcctggactctttttggttggtaaaatattgattattgccacaatttcagagcctgttattggtctattcagagattcaacttcttcctggtttagtcttgggagagtgtatgtgtcgaggaatgtatccatttcttctagattttctagtttatttgcatagaggtgtttgtagtattctctgatggtagtttgtatttctgtgggatcggtggtgatatcccctttatcattttttattgtgtctatttgattcttctctctttttttctttattagtcttgctagcggtctatcaattttgttgatcctttcaaaaaaccagctcctggattcattgattttttgaagggttttttgtgtctctatttccttcagttctgctctgattttagttatttcttgccttctgctagcttttgaatgtgtttgctcttgcttttctagttcttttaattgtgatgttagggtgtcaattttggatctttcctgctttctcttgtaggcatttagtgctataaatttccctctacacactgctttgaatgcgtcccagagattctggtatgtggtgtctttgttctcgttggtttcaaagaacatctttatttctgccttcatttcgttatgtacccagtagtcattcaggagcaggttgttcagtttccatgtagttgagcggctttgagtgagattcttaatcctgagttctagtttgattgcactgtggtctgagagatagtttgttataatttctgttcttttacatttgctgaggagagctttacttccaagtatgtggtcaattttggaataggtgtggtgtggtgctgaaaaaaatgtatattctgttgatttggggtggagagttctgtagatgtctattaggtctccttggtgcagagctgagttcaattcctgggtatccttgttgactttctgtctcgttgatctgtctaatgttgacagtggggtgttaaagtctcccattattaatgtgtgggagtctaagtctctttgtaggtcactcaggacttgctttatgaatctgggtgctcctgtattgggtgcataaatatttaggatagttagctcctcttgttgaattgatccctttaccattatgtaatggccttctttgtctcttttgatctttgttggtttaaagtctgttttatcagagactaggattgcaacccctgcctttttttgttttccatttgcttggtagatcttcctccatccttttattttgagcctatgtgtgtctctgcacgtgagatgggtttcctgaatacagcacactgatgggtcttgactctttatccaacttgccagtctgtgtcttttaattgcagaatttagtccatttatatttaaagttaatattgttatgtgtgaatttgatcctgtcattatgatgttagctggtgattttgctcattagttgatgcagtttcttcctagtctcgatggtctttacattttggcatgattttgcagcggctggtaccggttgttcctttccatgtttagcgcttccttcaggagctcttttagggcaggcctggtggtgacaaaatctctcagcatttgcttgtctataaagtattttatttctccttcacttatgaagcttagtttggctggatatgaaattctgggttgaaaattcttttctttaagaatgttgaatattggcccccactctcttctggcttgtagggtttctgccgagagatccgctgttagtctgatgggctttcctttgagggtaactcgacctttctctctggctgcccttaacattttttccttcatttcaacttggtgaatctgacaattatgtgtcttggagttgctcttctcgaggagtatctttgtggcgttctctgtatttcctgaatctgaacgttggcctgccttactagattggggaagttctcctggataatatcctgcagagtgttttccaacttggttccattctccacatcactttcaggtacaccaatcagacgtagatttggtcttttcacatagtcccatatttcttggaggctttgctcatttctttttattcttttttctctaaacttcccttctcgcttcatttcattcatttcatcttccattgctgataccctttcttccagttgatcgcatcggctcctgaggcttctgcattcttcacgtagttctcgagccttggttttcagctccatcagctcctttaagcacttctctgtattcgttattctagttatacattcttctaaatttttttcaaagtttttcaaaagcaatggcaacaaaagccaaaattgacaaatgggatctaattaaactcaagagcttctgcacagcaaaagaaactaccatcagagtgaacaggcaacctacaacatgggagaaaatttccgcaacctactcatctgacaaagggctaatatccagaatctacaatgaactcaaacaaatttacaagaaaaaaacaaacaaccccatcaaaaagtgggcgaaggacatgaacagacacttctcaaaagaagacatttatgcagccaaaaaacacatgaagaaatgctcatcatcactggccatcagagaaatgcaaatcaaaaccactatgagatatcatctcacaccagttagaatggcaatcattaaaaagtcaggaaacaacaggtgctggagaggatgtggagaaataggaacactcttacactgttggtgggactgtaaactagttcaaccattgtggaagtcagtgtggcgattcctcagggatctagaactagaaataccatttgacccagccatcccattactgggtatatacccaaaggactataaatcatgctgctataaagacacatgcacacgtatgtttattgcggcactattcacaatagcaaagacttggaaccaacccaaatgtccaacaatgatagactggattaagaaaatgtggcacatatccaccatggaatactatgcagccataaaaaatgatgagttcatgtccgttgtagggacatggatgaaattggaaaccatcattctcagtaaactatcgcaagaacaaaaaaccaaacaccgcatattctcactcataggtgggaattgaacaatgagatcacatggacacaggaaggggaatatcacactctggggactgtggtggggtcgggggaggggggagggatagcattgggagatatacctaatgctagatgacacgttagtgggtgcagcgcaccagcatggcacatgtatacatatgtaactaacctgcacaatgtgcacatgtaccctaaaacttagagtataataaaaaaaaaaaaaaaattaaaaaaaaaaaaaaaaaaaaaagagaaaccagtgctctattatctaggtatataccaaggttacccactgcttgactctcattattagccttctttgatgttctctggtacttgatgtctttcataactaatcaatgtattaatgtatccaatcatttactcgataactttattgaaagcaaaagcagttgcataccagctatcaagctggaagtgggagatacagccgcagacaaggcagatatggtcccagcccttaggagctcccagagtagcaggaggtttccccttccagtgtcttctctctgcttttcttcaaaaggaaaaggctgatgtgtataatataccatatctctttgaagttctctgattatggattttaggtttaaaccagttcttcatccatgactttataaattgaaaatccaggattttgctgtgttgttgtgttcttgttttgttttgatgtccctgttttctctagatacagttagaaatgtctaggaagaaatttttggttagtatgggagccccacaaagccatttttttaaacataaaatctgtattacatatcaggtatgaaatacagggggaatgaatcatttctccgtaaaggaaaatttaaagtaaatttcaggaaagtgaattctttcccgtttgcattaccgacagatgcagaaactttaatcgtcatttgctaagagggatatggcagataatacacaatagatgtcgtagcaacattcactcgcattctttttttttttttttaaagaaatctttctttcaagaagctattctaggatctttctcatgacagtgtcctagttcttatctttgctacacacaggctcacaaagtgttttctttgaagggcattttgttattggccctcttttcatttttcttttccgtagcaaacagaaccgaaggtgtttactccccacggtgagagggcacctgggtgcacaaacagtggtgtgaaccactggcctttctctgctttccgttccctgaatgtaagaaacaggtgcagtgatcaattcactgcgtgcagtgaaccccaggcagaaagagaacgtcgtgtcacagaccttttgttacttggagagaatgagcgggaagaaaggctgcctctgctgctactgagacccttttgcccattttattgactgctataggttcatctatcctaatttgtctccggctgtcccagtttatccctgttattcttgtgttactttactttactatattttattttattttattttatttattttagagacagagtcttgctctgtcacccaggctggagtggagtggcatgatcatagctcactgcagcctcaaactcctgagctcaagcaatcctcctccttcagcctactgagtagccaggattatagctgtgcaccactatgcccacctaattttttttttttttgaaatggagtctcgctctgtcacccaagctgcagtgcagtggtgcgatctcggctcactgcaacctccacctcccgggttcaagcgattctcctgcctcagcctcctgagtagctgggattacaggtgcccaccaccatgccctgctaatttttgtatttttagtagagacagagtttcgccatgttggccaggctgttctcaaactcctttaactgtttttttatttttatttttaatttttaaaacatattgtagagataagagtcatgctacattgcccaggctgatctcaaactcctggcttcaagcaatactcctacctcggcctcccaaagcacctggattacaggcatgagccagtgtgcctgaccctgtgtgattattattagcatcctggacactctcaaaagtgttcaggtttggacaatgaactataggatcaccctaattacatgagattaagagtagagaccttgaccaccagaaatggtcaatactcaccatatattttcttcctgatgttagaacctggtacttttgggaaatgaaattgtacatgagatatatgcagaatgggcgaagggagcgaaaagatttaaaaaattaagctcgatttattgagcgcctcgagtgcgctcagtgctgttccaagtgctgacagcagagaggtaagttctgttctccagtgttcacctcacacgtgcaagccaggtttgaaaacacactgtctttccttagtatccctccacccctccatgtgactatacgtatgtatcaagtttgtgatatttcacttctgggcttcttttcatttggaaatttaatgtcagtgtatcatgttttaattaataggacatcatgttatgaaactgttgaatcgaatattttccctaggcatcaaattacttgtcagtggaaatttgacatctagatatgagggacaaaagagatgagaaaaataatagtaaagtgttcctaaaggatgctggtatactgtttaggtattttaatgcactgttacaacctaaagtgtcttgtaaagtatgttctttagaaataaaataaataaaacaagacatctctccataggtacaaatccacttgccttcctcaattcctatccttctgtgatgggaaatctctgctgtgacaaagaaccatgttaagaaaaccataaagttgtattgtttgtagatttttttaatgactaaaggaagatattgcaagtagtagaaacaaatagaggaggtggccctgaaggtcaatataacggagttcactgcagaaaagagaaactactctaggtacgttagacacatatcaaagttttggaaaggctaaagtagcaggttttagacttggcttcgaggacagatttctaaaactatatagaactgatccaataagaaactaccatctccggggtaccactgaagcaatgatttcaagaacatactttgtaaataggaactaggaaccaggaggttgaaatctagacgctaccacttttgaagctgctgttagcaactgcccttctccagccaggaagctggagaaagaactttggaactctgatgtaggaaatctcatgtttctttgactaagctcgccaacagaaatagccaaaaggggcagaaaggtgacctatgcctcacttccactttccagatctctcacaagtatacacatttggcaaaacgttgccagatttagcaaataaaaataatgcatgcaacatacttaacactaaataaaaaaagattgtgtagaaaatttaaatttaactgggtgccttgtattttatctgacaaccctaacttattatatcctaattcataatcagaacactagctgcatggaagtctggcaaatacagtttttaatttccaacctgtccaactggaaggatggtaagtagatttaggtgagccagttcacagtattaaccaaagtagattgcctaccaagaatagctaaagcctttctgcccccagacgcttatgctaccatctgaatatttttactttgcattcttatattcttggaaatcctatcaatctgtgattcagattggtttggtttaactcagcttccccttttttttggagacagggtcataccctgtcacccaggctggagtgcagtggcacaatcatggctcactgcaacttcgacatccctgggctcaggtgatcctccctcccacctcagcctcccaagtggctgggactacaggcacgtgccaccacaccccgctactttttgtattttctgtagaaacagagtttcgccacattgcctaagctggtctcagattcctgggctgaagtgatccacccaccttggcctgacaacgtgctggaattacagatgtgagccaccatgcccagcccctctttttaaaatataaaaatctcccagaatgtgaaagttgtcagtctatactttgggaataagattttcaacagatagaagagaatgaggattaaaacataaggaagtttgggagtagaaaatatgggcaccagaaggtggaaggagagagcagatgcccatttatatatctcctttgttgggtgttggacaaatccaggtcttaaaataggaagtatttcttttccgtacttcttgaatctttcatatcccaaaagatgcatatttcccaaatcatataacccaaagtcatgctatcaaaatgatataaatcatccatggtataggttaaatagctatatatgtatatgctggtctgagacatgtatatgactattgtgtccatggaaatttgagtttggggttctggaccatttatttgcaagtgatttttggttagagaactctttgtaagttggggattgcttttacttattttatgagtaaagatgtcaaaaggatgactgctaaatttgcactgtgttaattcactatttagtgagaagaaatattagactagctatgaaaagtaaaactgcctctccaaaaagtcaaagctgatgaaaaacagtcatacaagcacaatgccgctcttcggaaacatggaaacactttttccttcccaattttccctcagattttctcttccgcatttaaaacacttgggtggttcaagtttctaggctaccactgattgtaacagcaaacagtagcaactggaagcagtgggatgttgggagaagtaatagaggtagctgctacccaagttatcctggaggattttccatggcaatgaaatcaggtagtagaagcttggctaactgagtgtaagcaaacagttctactgagaatggtgttgtcttttcaatccgtttatctgtgatggtgatagtgtgaaacaggggaattttatccaaggtttaaggaaggttatttggttaaaagaggatattgttacagtgaagtcaaactttccattaactttttgctgtaacaacagattgaacgtagcatttcaccgtcaacgagtaaagtgaaatttacagattaacttatgtgcctcttttaaaatatatcagatttctaaattgcttttatttcagaggtatgggaggttcactttctctttgaaagtgtacattatttttctagtgtcttacatctgcctacaaagatgttattttacttgaaagcacagtaactatttgatgagaatttgtcagcatcagtaaattaaagaccctcaaatgatttctactaattatagtttaattccgtacatttaatgatattttaaaacacatgagttatttcataactcccaacatcacaaggataaattttattctacaaacaaaatattgtgctaaatgaaatagttcatttaggcaaagaaaggagcacagaaaattagtggaactctctgctgtaagtaacgtagacattacatggcatattgagtctccatgaatattgtcatgttatgttttaaaaaggtgatcgaacatatggcatttaaaagttccaagtcctcttttaaatgcttcagaatctattatttaatgatcatcttggatctcaaaactgatcttttgaaagattttattcgccccatgtgttaatatgatttccctgtcatatgatatgattatctatcaatacttaaaaccagcagccaagtaaaaaatcagttcatatcatttaatgaatactatgagtcaggatctgggtaggcaagctattttcgggtttgagtagttccaaagcttaaaaatcttatattgattttacagtgaagaagaaatagtcttagctactttggaggtttcaaacattgactactcaaggagtatttccttgctttctcaggcaccaggcagtttttcaggagcaagcattcatccattcagggaattgtaacctgtagtttccacttttctagcaatcacacttaaaaccatgagagtaggccataggacataaggagctcagcttctcagggcaagcacatcctttcagctttcacctgtccgtttgttagtgttcacttccgtgctcaaggagtttcttgttgcctctgagttctaagagacagaacgaagggagaagggtgcagaagtctaacgcatgttcatggacttatctctccaataaagagcttgttttatcttcttttatttatttattttttctaatgaagccattagcctcaaacaaagccatggaatcttatcagagtgaaaccggggtcattccataggctggctgagtgagagctccatggcacgatgatgtatggtcactgcacaacaacgcctttgccacaacacatgtgccttttaattacactttaaatctcatttgaagagatgttatcattatggaaattgctctgtaaatgtgcccaggatgagacccaataaaagtttgctgagaagaattgaagacagaggagatgaatcagcagctaaaacattaccatcagacagaattttcttggctgtaggcaaaacagcccatgcaataacagaaaatcttcattgactcagaggcgtattttccctagattattatggggcactcctgcctgtagcactatcacttctttgataagctgaaggaagcgttctgctctccagctcagcgggcctttttctccccaacctcagagccatcatttgaatttatagttgccaaaatgaataatacagtattgcccttgtgttcctgacttcatgcatgcatgcagagcggggttaaggttctttaaatgaaagattgccttctattcatgcaataaagaacacctctgcttcctttccagggtcatttaaaaataactataccgctgggctatggaaagcacataagaaagattcttagggtaaagtcaaaatgctcttttctctacaacaggcattgtctcatatctttgtgtagcacagctgatttgaagttttcttttaagcacattcttaattatcttttcctttgatcttgaactgtttccctgggctaccagacagagagcctagagccctacctccgctttccccgaggtgcaaactgctccgtccttccacaggcaggcccctggctgaatgcacccttttctccatggttacccacccacctctctgttatttgttacttcccaagtgaatggcaggttaaaatgggaaaaggtcaggttatctgaatgtggttagagtgaaatgaatttcctcattgcacccaagaactgtcctttgacaggtctccttccccaaatcgggtcattttgtacgtaggctcactgggagtaattctaagacaactaaataagtaaaatcacattttggtgccattttccaatgtattcttcttcttgggggttctcctttaaaatggtactggaaggatacgttgtcttcattaatccattgtatgtcccgggggtggaggtggaggtggcagtagcagaagcccgtgaagtaataggtcgtattttgtgtttataaatatttctgcaggtttttgaggagaagatccatcattcttataaaggcattcatgacctccagaagattaagggctgttatgctagaacagtgtttcattcttaaaatggggtctctggactagcagtatcggcatcacttgggaacttctaagaaatgcaaattcttgagttctaccccagacatacagaatcatgatctctcagagtggagcccagcagcctgtgttttaatgagccctctgggtgattctcaagcccactcaagtttgagaaccactgtactaagggaactactgatgcatgatgcaagttcacgctcacaggcacgtgtgaatgacacaaagaacacagacgcctgagagagcaagaaagacaacatagactgtctgactccctgctgggcccttctttaccgcccctatttcaggctaccatgcccatgagtggatgacacgtaccccccgacaaaggtcaacaccactctcccttccacaccctatcactaagtgacaggctaagcctatgttaaactgctcacatctccttggaaattcaacactttaataataggtagcattatcacccccatcttcttctctaagccagaaacccaacttgcctccctatatgttatccttgcattcagtcagtctctaagttgtattcatgatctctcaaaaatatctccctttttctcatcctgtgtctattacctcagtttagatctccatattctcttgcctctaatgttcttgcctctaatgtaccttttcactgccaccaagatgatgttaccaaaaaatcttaaacagattagacatcttcacaggataaagtccaaacccttagcttgatacacaagccccttcacaatccaggccctccttcctgtgcagctatatatatatatatatatatatagagagagagagagagagagagagagagagagagagagaaattttgatcttaccactctgtctctcttcccgccatgggtcttcccctcttccctccggagttacttagctctgatgtgtattcttatctcgtcttatcttcaacttcattcatgtttttcccactgcttcaaatttcactctcccacttctcccctggccagctgctactcatccctcaagaccctgatcaaatatcatcacttgtatgatggcatctgcaaatcttggggggcaaggctaattgttctttgttcccacagggctgtgttccagtttaacatgatcacatgttattttggttcatttatttgcttaagactttttcagaaggctatgggctctttaaaatagagaacttacatcttgtagttttaagagtatttttagtaaaagtttagagtgacccccatctttctgccagcccacaaaaggaaaacatcaaaaagtgaatgtgtaaaaggaagagaactctgacaaaaccaggcagaaaggtttttcagcaagtctttttattttctgttcaggataacattaataattatccacgttggtttctcattctcctgttggtgaatatttttctgctaaatttaaaaccgtatcacaaactcaagcagagatttacaacatttcaacagcttttctacccctgccttagaagggtggatcaaaaacatttgtccatggtaaagcactatggacatgacttagttaacaattctctgtttgggtcaccatgaggcttcttcgtttatactcagggtcagcgacaatgctgatatgcagctacaatttctcatttcttactcagggtgttatgaagcagatttccactgttctttaatcgttattaaaatgtagtccaggtgcagtggctcacgcctataatcccagcactttgggaagctgaggcaggtgggtcacataaggttaggagttcgacaccagcctggccaacatggtgaaaccctgtctctactaaaaataaaaaaactggccgggcatggtggcaggtgcctgtaatcccagctactcaggaggctgaggcaggagaatcgcttgaacccaggagggggacagaggttgcagtgagccgagatcacaccattgcactccagcctgggcgacaagagcaaaactctgtctcaaaaaaaaaaaaaagtcattctcatgtaaaaattcttgtaaaataatctgtaaagtcatcctcttatctgttctagttcttcataagacttatataacatgtcatatgggcatggaaaggcctaagccttcccaaaccttgctcttttggggatgattttccaaatgtacttgttctcagttgaaaagagcattgcggccgggcgcggtggctcaacgcctgtaatcccagcactttgggaggctgaggtgggcagatcacgaggtcaggagatcgagaccatcctggctaacatggtgacaccccgtatctacttaaaatacaaaaaattagccgggcgtggtggcgggcgcctgtagtcccagctacttgggaggctgaggcaggagaatggcgtgaacccgggaggtggagcttgcagtgagccgagatcgcgccactgcactccagcctgggcaacagagcaagactccgtctcaaaaaaaaagaagaagaaaagaacattgcatcatggcacaaggacacaaaaaataccctggacctgcttcagtgagatggtctaagggtctctagcatcttctgaactgaactgaatgctttgggaagaattaatagatacacgatgtatattagttcgtttcacactgctataaagaacttccctgagactggggtaatttatttaaagaaaaagaggtttagttgactcacagttctgtgtggctggggaggcctcaggaaacttataatcatggtggaaagcaaaggggaaggaagcaccttcacaaggcagcaggagagagagagaaagagtgaatgggaagagccccttataaaaccatcaaatctcatgagaactcactcactatcacatgggaaaacagcatgggggaagccacccccatgatccaatcacctcccaccaggttcccccggattacagttctagatgagatttgggtgaggacacaaagccaaaccatatcacaatggaaagctcatgaatgggttctaagaatgaggaaatgtaccttagcattttgcctacttttcctttatgacatttttttcccggcaaatatgccaaatattacctacctttacatcagtgtccacatgcatatcccctgtcttcctccttttcctcatacattaacaaaagagtaactttgttttctccccatcactgttcaccctattgtataagagaagaaaagcaaaataggatgaaagaactatctaggcacacacacaaaagtcacactctccagaagaaagaatttgctctacttggtagtagacagaaattaactcactgaagatcaccagagaatcagatccaattatatcagcaggactttagtttacatcatggtactagaaccttctttaacattcaaaacttatgaatacctagaaatagttttaaggttaatatctctatgctgtgggctaaagagtacccacaaatgaatacagttgtgtctgatgagtgtctgtgattattttggaaattgtcctgctatttaaaatgaaaaaaatagaaatgtcttagattttcctatcattaacctattgtaaacaattacatcagtgtagggttgttttgtggttgcgtgggagtattttgaggtttttagggggtaaagtgggggatagaatgaagttgttgtttgcatttacaaccctaataattaaaacaagccagagggaattacctacatggctgttgtgatttctagtgtatgatcaaaaataattatggcactttgccatatgttcttgctttcttcttagatatgtgttattgggaaaagatgagacttgacatcaactaattgcttttttctaatatacaaccttgaaccacagtgattctctggaggacaaaaaatagcttagtgacaaagagattccagaaataagagcttttcgagcttttaactctctatgtaatatagacaaattgcacagattaatataaccaaatatgtattggtccatgggaagagagttacctatttgaagaataggagtgtattgtgttcatttagaaccattcagaaacatcaatgatattagttctgagttgactaaggataaatttttaaaagcaatacctaattggaaaattattcagttgttgaccattcctatcagtgctctgaaactaaatatctcacagatgccttaatgagttattataattatgttgctgtgatacatgtagcccaagtcagaagtcacttgctttgtatttaatggatggggaagacactggagcttggagggaagagaataaaaataacctagtttcaggaagatctatgctctaaccctgcttctgccacataacaacaactctatgatttgtataagttactttacctctcaaactcgtggtttcctcgataggggataaagaaggcctatttcatagagttggtgtaaaggatttataagggctgtaagtattagttcctgccctgtttcatccccctaccctacccccacccctcatcatggctctgcaaaaacaaatatgtctcagagttggaaagacccatctggtctttctcagataagggtagttttcttcaaacagactgattcctgcacataaaatataatataaaaaaccaaaagtaccttcaacattgtagacttttcatatgtggttgtctctgtgacttaaatgtacaatctagggtttgcatgttaaggtctttcaagattactgttggcactgatctgaaagatgtctcatgcaggaaatgctcacccaattatgagcactgaggctgtatagcaatatcagaaataatattgcagcacagtattttctatggattttagatgcagtattaaaaaaagaaaactcagcctgtctttaagactcgttttctctttcaacaccagaattaaaaggcatgccattcttttttaaagtttatgtgcagagccaaatgaatatcaacattagttctccactgggtccacggcttctttttaaaaatatctgaagcagtgttactctacccactttttctcaggaaattgtgtcctttagaactggcacccatatagtttaggaatgcttgatagggtatattttaggtgggagtcacctgtgcctatatggagctttgatgtcaatgcccttgtcatttggtgtcaatggttttgtcattctaatttatttggccccaaggtgtgtgtgtgtgtgtgtgtgtgtgtgtgtgtgtgtgtgtgtgtgtttgaaacacagcatatgtatttttttcttactccttgagaaatagaactttaaataacatttctatctttaaaatgtacttgtgaatagttatcactttcctgaattctaccttccaaaggtaggacaagagaaggatggaattaaatcacacatgcagctatttttataacttatgagcactcaatgatggtagcatccctcttctttaccttctctctgattctgaagccactgctgttttggttcctgtatggctgggactgcctgtccactagacttcctgccttcactctgaccctgctacatttaccctgaacaccatcctcccaataatcattaccagatgctattttcacaatgttacacctttacacaagaagctacagtggaatattatccttacagaatcagataaaaatctccaggcggcattctaagctctcattggctacactgtaccctttgaacctgaacttcctgagaactacctcttagctcctgcctgtagctctggctcccatcttcatgcagtaggtattcgttttcttttgaacggcctcatatcttctctgctagcaggattggagtcatggcagaaagtgagagggggactagaaggatgcaacattaatgaaacctcacaataggttaggcattgggttaggtacttggttgatctactcacatcatctcatctaatctttgccaaaaccttaaaaggtaggtattatcggccctacttatagacatacaataggtacttaatgcacatttttgtgatgaataaatattcgggaatttttgcattgtgactggatgagaagaaactaggaaaaacaagacgtagatgagaaagatacctctcatcttacttccaacctaggagatcttaaatgaactcatcagttttaaaaggtaatcttaagaatggagtcagagggtcacacaaggagagaaagcatcacgtattaccagagttcgggattgcttaaggcggtttgacagtttcctccgggggtaatccaccctaggccaggcatttttaaagattagattttgaaatgaagctttgcacttgggaatatactgaggcaagaaagcatatcccttctccctgctgagagagcatatcccttctctctgctgttgcagtgcttaagtgtgagaattttcgaatgagatatgaaagcaaagacaacaaaccctgcaggataatagtctctgaggactttaataacagccgtttttaaagcaaagcctgtggactcctaaatccatagctgctcgtttaagatgcaacgcaatgcagtggacctgaaaacatactccttatctacctagagcaaccaggctccaagccaaacagcagtcctcaaattaactcttgtttctcttgggacgacaactctgctgcttttaaaggtgttgcgtggccacatatagaataagaagggaaaaaacagtcacaccctcttgtgagtctgtatccaactgcattttctgatctggttaggaacctccggtggttagattagaatcctgataaggccaagactgtgggtccaatttcttcctatggattcttctcgaaaaacttgttaggaaagatccacttcgggtttttttttttttttttttgcgcttgttttaattcccaatccataatagactgatacttttgtaacatgcaataaaaatgaattattttaaaaattacaaataccagacatacaaaatttaagccgatgctttttatttttagattgctgtacacgtttctaaagatttgctttcaatttctgttcttatgtcttcataatagaatatctgtttctgtgtgtgtatacgtatgagtgtatgcaagtgtgctccaaaagctctactatttagagctcatgtttaatgagtcatgttggataaccagtctaagggagttctactttcatataattgtttttgttttatttttatttaaatcattaacaccttttcaaaacaactgtatcaaataacagtcatttggtcatttgaagcatttacatacactgctttcttcttaaacagattttactgaatgtaaatctgctttccctggctaattcagcatcatcatcctgagcattaactattttgcttcgctataaaacgaggtgatgccttcaagggctactgatgcatggagagctgttagtttccacactgtgtgaccctggtcaattatgcatgcccatggctccttttacacctttctgattctctgtaaggtgtcacttcttcctactctcaatttagccacttaggataatttctttactattttgaattgtatgttcctgaccttctaagttcttagaaatcagaccactttttttcccatcaagctaatttaaattagataaaaattatcagtaaggaggaactaatggccttataattattcatatactaactgctttcagaaaagcttagagataatctgtctataataaaattcttaaggagatttggtcacttattgttattctttctacaccattgtgtttgtttccttacttctcagctatattaaaatggggaagttttcatttgctgagtcctattttagagaccaataattccatttacataggaaaggaaatatgtggatacgattattcatgatgttctagaatagtatcacaaccatctgcttaatggttaataaaatggttaataataaaaagaagggtacagcactaattcttgacatctcccttctttatttttcttctagtaaaacatccataacttttcctattcttccccagttgtattattacttatgaacaccatggatcattctactttttgaatgaaatagtacaaatttaatattcgataatcttgtctttgtacttttctttctaaacttttattctcggtggcttcctaaaggaagactttattctacttggtttaagcagttggtctgcattctacctatttctctcaactctcattgtccattccaatcaggttgtgcaattcattgtccctgctcataaaccaaattcatttcacctttactccattcccatgctattctttttacctggaatattttcttttgttccaatttcccaatcgtatacatccctcaaggctcaagccaagtcctgtaacttcatgaaatctatttctaacatctgatttccacatggattatcttgtaatagtaagccctgcatttgctattatttattaaagatctcttgtgttctagacgctattcaaagtattttacaaaaattccatgtaatattcaaaaaattcagcaggtatgtattattatttcatgtttagtgaaaccaaagtaatgaaagagttttcatcattatgtggctaataagggaaagagaagagaagggtcaaacctatgtctatttaactgcactttgccatgagttttctctggaagctgagaaaggagattcacaacaagagtagatgagactcagataagaaggaagtgtggaatttgaaaaagcccttcagaaaacaggatctcccctactcctaaaactgctatactgtgaacatattgcttgtctcataactgaacttttttggtactctcagctgaaatttgctctataattgtacagaactttaggccaaatgtttcttttatggggacacacattatttgtttcgtttgcacccattttctcaattactttgtgttttctcttgttgtattggatgcatctctatccactgctacaaatctgtttaatagtctttatattaataagaccatgaaattgctctttgtgtgctgacatagttatcctttattttctaatggcagtgctagatttgctaaaatttaggtagtagcattattaataggaaaaactaccaccaacaactaaacttgaaaggtaatatagcctagtggctaagagcacaatccctgaagtctgactgacgaggttctaaatcttgctgcatttattagctgtgtgaacctgggcatttttagttaaccttacagtagtttcattatcttatatggaaaatgaagataatagtagcccctaccctagagggttgttgagaggagaaaatgagctcatgtatatacagtgctttggacagcacctgatgtacagtaaggttcatgtatgttgttgttcttgctgctgctgctgctgctatggtttttgttatgtaacaactaccttttcccctttgttcattcgttattgcttttcctaaagactacaatcacaaaaaagaagaaaaaaattagagagcatacagtgaatgcagtaatgaaggcttgaatgatcttttctagttaagtcagaagtgaaataaaactatccaaaaatttctatgaaaattatcctttgtccagattggctacccactgagaactccacttgattctccatatcaatcttttgctcttttgtgctacctgagtctgaggtgtagtctttaaatgatgagtttattggcacaagacagggatgccctctctcaccactcctattcaacatagtgttggaagttctggccagggcaatcaggcaggagaaggaaataaagggtattcaattaggaaaagaggaagtcaaattgtccctgtttgcagacgacatgattgtatatctagaaaaccccatcgtctcagcccaaaatctccttaagctgataagcaacttcagcaaagtctcaggatacaaaatcaatgtacaaaaatcacaagcattcttatacaccaacaacagacaaacagagagccaaatcatgagtgaactcccattcacaattgcttcaaagagaataaaatacctaggaatgcaacttacaagggatgtgaaggacctcttcaaggagaactacaaaccactgctcaaggaaataaaagaggacacaaacaaatggaagaacattccatgctcatgggtaggaagaatcaatattgtgaaaatggccatactgcccaaggtgatttacagattcaatgccatccccatcaagctaccaatgcctttcttcacagaattggaaaaaactactttaaagttcatatggaaccaaaaaagagcccacatcgccaagtcaatcctgagccaaaagaacaaagctggaggcatcacactagctgacttcaaactatactacaaggctacagtaaccaaaacaacatggtactggtaccaaaacagagatatagatcagtggaacagaacagagccctcagaaataatgccgcatatctacaactatctgatctttaacaaacctgagaaaaacaagcaatggggaaaggattccctatttaataaatggtgctgggaaaactggctagccatatgtagaaagctgaaactggatcccttccttacaccttatacaaaaatcaattcaagatggattaaagacttaaacgttagacctaaaaccataaaaaccctagaagaaaacctaggcattaccattcaggacataggcatgggcaaggacttcatgtctaaaacaccaaaagcaatggcaacaaaagccagaattgacaaatgggatctaattaaactaaagagcttctgcacagcaaaagaaactaccatcagagtgaacaggcaacctacaacatgggagaaaattttcgcaacctactcatctgacaaagggctaatatccagaatctacaatgaactcaaacaaatgtacaagaaaaaaacaaacaaccccatcaaaaagtgggtgaaggacatgaacagacacttctcaaaagaagacatttatgcagccaaaagacacatgaaaaaatgctcaccatcactggccatcagagaaatgcaaatcaaaaccacaatgagataccatctcacaccagttagaatggcaatcatttaaaagtcaggaaacaacaggtgctggagaggatgtggagaaataggaacacttctacactgttggtgggactgtaaactagttcaaccattgtggaagtcagtgtggcgattcctcagggatctagaactagaaataccatttgacccagccatcccattactgggtatatacccaaaggactataaatcatgctgctataaagacacatgcacacgtatgtttattgcggcactattcacaatagcaaagacttggaaccaacccaaatgtccaacagtgatagactggattaagaaaatgtggcacatatacaccatggaatactatgcagccataaaaaaaggatgagttcacatcctttgtagggacatggatgaaattggaaatcattattctcagtaaactatcacaagaacagaacaccaaacaccgcatattctcactcataggtgggaattgaacaatgagaacacatggacacaggaaggggaacatcacactctggggactgttgtggggtggggggaggggggagggatagcattgggagatatacctaatgctagatgatgagttagtgggtgcagcgcaccagcatggcacatgtatacatatgtaactaacctgcacgttgtgcacatgtaccctaaaatttaaagtataataataataataaataaataaataaataaataaaaaatgatgagtttagacaaatatcattatggtagtattatattatgttatgttatattatattatattatattatgtataatgtatattccttgcagcctgccctgcattcccaatctatgactcatgctgccttattgatactgaaaaatctccactacagcatgccagcttttgaaagagagccttgggttctttcccaatacttaccttccttttagggcaacctatctgagtcctgtagcttgaaagatttcctaccagcctgccatcccaaaggaacatggatgaactatgtttatgctgatgtgtcaagtcatttcttggtatggttcatagtagtccacatggctcttgtagacaaagagatgaattactgatggcagaatttctgttctggcaacagggaaatttgcagaaaggagaccttttcagtgtgaacattttttgctcacaggtggtccaggatgcccaatgctaaatgagaagtgaaaagagcaatcagggccaggtgtggtggctcacgcctgtaatccaagcactttgggaggccaaggtgggcggatcacgaggtcaggagatcgagaccatcctggctaacatggtgaaaccctgtttctactaaaaatacaaaaaaaattagccaggcgtggtggcgggcgcctatagtcccagctacttgggaggctgaggcaggagaatggcgtgaacctgggaggcggagcttgcagtgagccaagatcgcgccactgtgctccagcctgggtgacagagcgagactctgtctcaaaaaaaaaaaaaaaaaaagagcagtcagaattcaatttttcattcagaacaaatcaatccacgtgggtaaacattttatcaaactcaagaatgctgtctttcagggtgcttttccctcaacagtcacttatttcctcttgcaagtagtatcttcgttcaggttcagtgactactgtgtattatatccaatgcttctggcaagtgggttggtggaggcagcccaagatcttctagaatcaagagaattggatccatttcccagttctaacacttatcagctatatggcttttaggcaagtcagttaaacatccgagtctcagtgctctcatctgcaaaacagaaaatgtgatgtacttcacagagccagggggaggaataactaaggtggtacatttgtacgtgctttgtaacctgtaaagccctttactgtacacgtgtcatttacagctctgtatcaccatcatgacctagaaaagcagtactgacagaagacttatcttcttgccaatgctaagataactttagccatttctgcatttctaaaggaaggagtctttatcccagtatctatgaagacttggcaggaattgccgtcaatatttagttggtaatataaacgaattaaacaaaaatgcacactaggttttaggaaaattaaagacagaactatcatttgtactcctcttacatttcccaaagtgctaaaactagacaataaatcagtcctcaataaatgcttgtttatcaattttatattcatttatttgttgataatacaacaaagatgtttatatgcagtataatatatatggcaaagatgaaaagtagcaaattcatgaatcaacatcctatttatgcttgagaagacaaagaaagtgttggtgacttcatggtatacataaccttaaggagctcgtgattgagcctgggtctctgctatcaatgtaggatataaatttcaaatgtactatcctttatatgtatgttaatgtagtaaacatagaaaactgatgctactagtgagaatacttttacttgaacaactaaaagtttgtctttaatcccctaagtgcatacacaaaaggaaagtactgtacaaatcaagtacaacagaagaagtaaagtaaaagacaagtgaaggaattatctggaacttagatctggttggctttttctcctgaagtacttagataaattaactcacttttctcttttgctgaagaagtgcaaattaggcaggcatgttattccacgtaggcaaaaggaaaaaagaaagaaaaacataaaatggctatatatttgaccaaacttcgttctgcaagaatcccaatactaaccttctaccatataaactactttcaaaatcaggctatatccttccagtacaaacctggtttgtactactcagagatactactcagaaatactttcagtatttcccttctttcaacttctgatgtgattctatccatattcccctgcctgtctcccagtcaaagagaatgggacacaactctctttagagtccatcagtgatgctttagctgccaaaaatagtgacaatagacattcattgtctgtctaccttacttgttcaacattcagaattctgcatcttaagaggctgtggctgaaaacttgagccagttcttcagaatttctaacatgttatttctgccactttttctcccttactttagcagagtaatttaattcaatttgagagagagagagaaaaaaaaaacttttctagttacacagatcaatccaattgtttggagcttcagaatgaatttttaaacttgttgaacagaagcatacaaatctctaagagcaagtcagataatatacaaagcctccattcattgtgtaggcagaaaggaatgctggtacccggcagctctctgaggaatgttcccttggctttgactattctgctgggaacaaggaaggaaacacatatataaaatgaatttataatgtctctggcttgtaatggcagaatgataagaaaagttggctgtttaatataaactgtcagttgcatattccaggcctcctctctttgaggttcctcccacatccacacgcctggctactgtttagtgcggagtacaaagtggccgtttattattattgactggtgaggcctgtgctccaaaattcattctgtcaacagaatgtaagcaaagttggcattttaaagcagggctctttcagtttctgggttttctcaggattgctatgcaacaggatcagtgctgtagtgcccggttcaagctgaaaatgttacacaggaagacataccatgtaaaggtcagattcttctactataataattttcttgatctgtgtgtatacaagtgaagttgaatgcataacctcttatcataactcttaccaaggtcctatgtactttccacctgtcaagcctaaaaatgtgtattaaatgggaaatcaaaactaataaatgtatgatgctgtactatatgtatgatgctataataccaaggtgaacttaatttgtgttgtcaagaagattttctctcccatgacagactcccaggaatgtgctggtgctgtgggccaagtgcaatcttgtttattagtctctccacgcttttatggtcagagttaactctacagattactacgtaaatagaaaatatgacttgatccatatagtaatgaaattattggcactggggtacactttatcatagaattttattgcctatcacttccataaaataatacattttgtccatagactagaagatataacttgtgaactttataaagttataaatacattactttccaactcataatggcaaggaataaatctattacaactaataagatgcccattttaaatctacataataacaggagaaggcaatacgccaagaaaagggatttgagatgtatcttcttgttagtttagcctgattgaaatgtcttttgaactaataattatttatattttgcaattctccaaattcacattcatcgcttgtttcttttgtttggtaattctgcacatattcttcttcctgctgtcctgtaggacctccaaggtgaaattgaagctcacacagatgtttatcacaacctggatgaaaacagccaaaaaatcctgagatccctggaaggttccgatgatgcagtcctgttacaaagacgtttggataacatgaacttcaagtggagtgaacttcggaaaaagtctctcaacattaggtaggaaaagatgtggagcaaaaaggccacaaatgaattaaaatggccaaattttcctcattgtcttagcacaagtaactggtatctcacatgtctacgtaaatcatccaatttcagaatgattcactgtattttgaataaatgaatcatttatttgcttggtatggagatgatacttgaggattcagattagattaaagtggtaatgttttataaacataggagacatgcatattaagacatcagagtgaatttaaatgaggagtgcagctattctagtttcataaatttctctcttggcatatcacagggttatacaaaaagtgataaaaaattaacggatatgtattatggaattatttttggcattagtctaaatgcataccagaggacagtctttaaaaccctttataacacattacaattatataatataaaacctgtaacacattataattaacagtttagaggagatagctcctacagttaaagagagactatagcaacttcctgtcttttgcttcctctcagattttgttaaaacacatcctctgtaaactaagcttttagttgtagtatactcacatactttatattttgcccccttctatgtgccagctttctttggagaagttagttaatggatgcatcatagcatctttgtaaaaagggcagagggaagttcttgttataccagttttgcaatagttccgtggaggaacaaaaggatagagatagtaagtaaaacgcccattgtaacttaaatgatctagcaagggcggggaatgaaagccaggcttcctgctttctaagcagttgcctttcttaattcatttctctttattaaaaatattttgtgctttcttctgtgtctagagaaaaagtgataatgaagggaggtagaagatgaccaaatggacttaataatagttatgggagtatacactaaatgacgggagtagttactacctctaggtagaaagattacagaagggagattttttttcttctttatagttcttctaacttgtccaaaattttaacatatatacttctataaggaggaaaatctgcatttttagtaattcagaagcactattgtaaatgtctgcatcaagtatgaaataatgatagcaactaatatttacatgatgtacctacataccacgcaatgccataagcactttccattcattgaccggtttaatgctctcagcaaccctaagaggtagattttattattgaattctttttacatttgaagaaagtgaggcacagagaggctaaataatttccttagggtcacttagcaagtggaagatacaagatgaaaacagggagtctgggtgggccaggcgtagtggctcacgcctgtaatcccagcactttgggaggccgaggcaggtggatcacgaggtcaagagatcgagaccatcctggccaacatggtgaaatcccgtctctaccaaaaatacaaaaattagctgggcatggtggcacgcgcctgtagtcccagctactcaggaggctgaggcaggagaatcgcttgaacccgggaggtggaggttgcagtgagccgagatcgcaccacttcactccagcctaggggacagagtgagactctgtctcaaaagaaaaaagaaaaaagtaaaagaaaaagaaatcagggagtctgacttcagagtctgaacttttaaccaccatatgataccgtagcatataaagaaagaaggaaacttctacaaagaaatgcatactaattgaaaggatgaaatagagagtagattttttctaggagtagaaaaggatttgtttttatgagaagtagattgctaggagtagaacaggtttatttttatgtataaggttttgttttgttttgtttttcacaagtttgcaccctggcttcccagacattgttccttatctccctattttgtatatgaattttgtgtcaacttggtggtggtacactgggagcaacaatggcaatagcattttcaaagatagggaggctctattagctttctacagcttaaactcttaagagaggtcagtatgtgtgatgacgtaggccactttgataaccttcgtcattaaaaaagaatgaaaatgtgagatggaaaaaatattggcaggtcaagttaagttattcttttctgcacaaaagaaaaagaaagatgctataattgttccgagtatcacttagtgccttttctctgcctcatgtgaacttgataaaataaaaggagaattgaaagtggcaaatagcatgtcagccaaaatatggactcttcattctcagcagtttcccatgtcagctaccgcagtttgattcttgctgtcattaatcaggtagaaaacagttagcttatctaaggtgctgccaattctagaatttaaatattcagatcaatggttttggcttttatataggcctatgtaataatacaggatatgttataagcactcataaaaagcaaagaagtaattctccacatcaaagcaatttagcttatttcctgacacttgattgaaattagggtattgatcaatctacagcaaatggcagggttcaattgagagaagtacagtataggcagtaattagggatgattatgaaatagaatagaataacactggaagagttagatatagaaccattagtggcactgataaacctgcattatgaatcttgtcacttcttccatgggggttattttaaaatgaaaagttgccacaattaaaaaatagtttcaatgatatactggaaaaataggcctgtgtttgcccaagttataacatattataaaaaattacagttggcccattgtttggtgagcgattctgaaactgctcttatatttcaaaaaaataaaaccattaatgtgtccatttttaaagaaacaaaattgaatttaaatccaaatgatttcgaagtttccctttgtattccattggctcataagagatatccttgtgcttccaaatacaagtccatattgtatcgttttccttccatttatttttcttctgccatacatcttttctcttcctgtgattaagattcttatttaagtcatcatgttatgccatattgatacatttgcaagaatactctaccttggacgctgtttatatcatattactcttttgttcaaagcttcaatcttgtaggtctccatatctccctcattcatttatttgttcattcaacaaatatttaatgaatgcctactatgtactaggcactcttctgggcacggaggatgcaaccatgaataaaacataccaaaaaaaatcactgctctaatgaagttatatttaatcattagaatctagtagaaccttctctctctgccaactgtgcctaataagtccttgctaactccttcccttctcttttctttttctgcctccagttcctttctcaccaagcatcattctgttactccccaacatagattctctgagccaagagaatcaataaattctattttctaaccccattcctactctccaacaatttcctcactctcccatatgagtatgtacccttgctggttctcacacttgcaacattctctttcctcttattctccaaattttgattcatattccataacaaatcttttcttttctggctgtttcctcactaggtcttcccaatactattctaatttacacttgataacatgtttcttcaagtgttcaagagttgctttatagggctatgcttactgcctccagctaacttatatgaatacaaaaatttcaaactcgaaatatgtgagtatggtagagtagaaagacatgggccagcagctgggcaacccagtttcccttctgttctattctgtcactaactgtcttagcatataatcttgatcaagtcacttaactgcttcagacttcaattttctccttcactgaaatgaagagtttgaccagaaatatggacagtctcttccagttctcttgcaatcgtacaattttattcttttagttctgcaatcacactttatgaacctggaaaattgtttaatttttctaccttggttttcttaattaaaatagaactgattgatttaaaaggcattatataaagtaattaagatgtctttgagagaaaagaaatttaattgaaattgtataatcctatctcataatttaattcaagaaaagtatatgctatcattccacatgcattattacatcacatgttggccaagaggtataaggaagaaaagtaagtagtcagtgataatttaagttccatcaaacaaaacgaaaacattaactgctttaagtgggagaaaaagagaaaattatttacttaaatgtacacacacatgcatacacacacagttactgatgacgttatccaatattaagatggtaattagtcaaagaaagtgtttttcattctaaaattccatatccacaatccttgcatttttaattttagaatattaataacttgagaagtggtcaagtcaattgttttacataagaaatatatatgaagatttcaatttagtctactactagattatttttccagatcattgtatatactattaactatgaaaatcacataatatgttatcaacataatttcagcagaatttacattatgtgagatttttatatttggcagaaaaatttgtaaatgttatataaaatgttcacatttatacaattgtgaacattaagaggcaaggacactgacattatatagtctgtagaagccataaatctattggggagtgcttgctattagaggttagaatagttagtgtctttgtataatggagaacaaaagaagggcaaaaagaggtggggtctacctttgagagaaaactgcaacttggacattgaatatctctgaccttctttctctctcttttagaatgttaattatgtttggatgttggagttcaagacctgtctagaaaaaaaaaatgttgacttctctttgggattctctctatttaaagagatagctcccattttaattctgtggttctttaattttttttgtttctgaagtacaaattcaaattattcatctgttgatgacaccctggagatttttctcagtgttctcttgtagtagtttcatggtttgaggtcttacatttaagtctttaatctactttgatttgatttttgtatatggtgagagataggggtctagattcattctgcatatggatatccagtttttccgcaccatttgttgaagagactgtcttttccccactgtatgttcttggcacctttgtcaaaaatgagttaactgtaggtgtgtggattcgtttttgggttctctagtcttttccatgggtctttgtgtctgtttttatggcagtattgtggttctttattatttctgcattcctcccttttctttctgcatgtttaagtgctattttattacatgagggtactaaagatttatagggatatatcattagttttataaaggaagtcaaagtgaaaaatgaattcaatataacacatttcactttaagaatgcatgcctttcagagtaaagttttattaaggatttcaaactaggcattaaccaaatcacagttgaaatatctgtgtctagagaaataacaatcactttatcagcccctataattcttagtgtcctgacactgaggagttccttaaagaccaagcaatatactccagcacatctaaaggctctgcgttttacctaaaccttacaaattgtggaaattatcagctttttagagattagcacttgccttgttaaacggtagtaacccctaagctcttgtcttcactaataaagattaatagacatagatagaagctaagcatgcccctttgaaccacctcttttattttccgttgagtgggtaggagtaagcagaatatatttgacaattagcaatgttaaaagacaaactttagacaaattccgttttgcagagtttatttgagcaaaaaacaattcatgaatcagacagtactcagaattagaagttcagaaagctccacccagcaaggtgggcaggcagtatttatagatagaaaaaggaagtgacatacagaaacagcttgactggttacagcttagaatttgccttacttgggcatagtgtaaataggcatttgccttatatggacatgagctgatcagtttacagcctgtgattagctgaaacttgactgctgggattggctgaggctcagctatttgttacaagaatgtactcttaagttgcatattgcttacatgccaagctgggttgcagtttgctatgtacagagtcagctttaggcccaatttaatttaatttaacagcaacaagcctttttgttcagagatcaaaaacatttggttaaaaccactaaggtttaaggattttctcatctaacaaaggtttgtaatttctatttcccatatctaaataggacagctcaagttatgtttttcagcagctgttttatacctttgcaatcttgatttctacatatgcaaaacaagaaggttgaactataatctctcaggttccttccaaccccaacagcctatgtatgatataaccagaaaaaaaagtcattacaaatacaaagaaacattttcaggaggagatattccacatgcaaacataggttaatcatttcaaaatatctggtatatacactcatgaaaataaaaatagggcaactgcttccgataaatgtattagaaatgtgacttgaaaacatttcacgggcttaacatggtcaaagaaaatgttttgagctcacaatgttccttacatttagatcttcaaaatcaagtcactgacaaatgccacctttgccctgtggagaccaagaagtaatgtttggggcatatcagaaatgctttaataaatgctttatcaaagaatggttctggagcttacctgtggaattgtgaaggttcttgttgaaagcagagattgttgatagaattatagaaagtctggaggtggcacctagcaatctcaattttaaacaagctactcaaatgtttcttatacacactatagtttgagacccagagctttaggttgaatacatttgtatatgctgttttaattcattctctggctgcctttcacctcttcagttcttactcagtgttctctgtcctttgtaagtttttcgcttcagtttttgtcctcctatcacatttttcctttcactcttgagctttaggagaggaaaaaaatgaagcaatttgatatgtagttaggatgatcaaacattctgaaattttatctaactccacagcttagaaaaaaattaaaggaagtccccttacccagatatgtgagagcttttcgtcttttgaggttccaggtccgtcttctgctgctgtattagctctcttgactgtcctctgtccctggcttctaacaacttccctatttcatgctattaagtttctcttagatcctttagaactgaattcccggctgggtgtggtagcttacgcctctactcccaacactttgggaggctgaggcaggtggatcacctgaggtcaagagttcaagaccagcctggccagcatggcgaaaccccatctctactaaaaataccaaaaattagctgggtgtggtggtgggcgcctgtaatcccagccacttgggaggctgatgcaggagaattgcttgaacccgggaggtggaggtgcagtgagccaagatcgtgccattgcactccagcctgggtgatagatcaagactctgtctcaccaaaaaaaaaaaaaaaaaagaactgaattccctaggtctcagttattttgctctctcttaggggacctaaaggggttcattgacccactaataatgagtcagcaccatttaacctagaactggaattttagcacttccttacataaacaaagccgcagcttgaggtcttaacataggcagcctgcccttcactatatcctcctctagacctctctgccacaaggatattttgtttcctctaccaggcagacagaggccaaacattagtcatcgttatattctctcttcccttcctctctccctactccccaatgtatcctagagacttaggggcagtcaataaatatttatttaatcagtgtcttttctaccatttgctgcttttccatgtctgagccctacctctctccacctacttttcaatatgtcctgcttgacagcctcttttcactctcaaagggaccaagctgtgaattccagacaccccaaggaattcgtttaaccattacacattacatgctattaaacagctaaaatcttgcatggggaattgtcgcttaggcttatcatggaaaagtggtaactgaaaggatggtacagaaacataaaagaactgacctctaattgtatgcaatctgcatgcactattatattcaattcatgacatttatggtatttcacgattcagttcttgggaaataatacccttagagtctggaacaatttaatttatcttatttgatggaaatgccttcatttttcctggacatattgtttatactgcaattatagaaagaaaatcttgacaatttggaaaagtagaaagattaagaaataaatcacctgtaaatctacctctgagggataacctggttgtcattacaaaattttttcctagtcaagcatgtgcatacaaatacatacacatacacaaatgttttagaaaaattcaaaaaatgtatttgttttgtaacctgttttctcatttagtaactgggatgatgaccttttccatatccataaatatttggctatgtcatcatattgaaccttgcaaaggattttactgtatgaatgcaccattatatatgtaataattcccttttaaattaagagctatttaattaaattcatatataaatttcattaatttctaaatttaaagcatatacaagtttcattacatttgaaaacaatcagtaggttggggttttgcatttctcaagcaattccctcatattgaatatttaagttgtttctgttttgttttatcaatcataaatgatgctatatataacatttttccacctatatctttgtatctttttccaatttctttgttagtataatttccttgaatttaagcctgtgggtcattgtctttgcacattttaaagacttttatgtattgtcaaattatccttcagaaagtttggaacaatttaatttcagtagataagtattctttggtgattctgtttgactaaggccaaaaggagaattgtatttgtaatgtcaagctaagttaccaaatggctaagggaaatgttgctccacctggttgctttgctttacatttcaatctttgcagcgttaaagtctttattatatttatgttataggtagcgttattatgaattaattagtaattgctgataatagctgagtgattgagcataatttctaatttacctgaagataaagctttgctaacactgcgtttcctctttgttttctggatgatgatttattttattaatttagcttctcatcttcaagtgaaatgtggattttatagcacagatcattcatttgtgtattcttaaatggcttctaaggattaacgtgttctaaatacagttgacggtaaagcactcagtctcctgcctaaattattcatgttcgggggaagctttcagataaatgtctgattttactcttccatgtgagttgttgtcttagtactttttacacaaaggaaacaaagcagaaaatgttgaaacttggtgaagacaaatcccaggtgcacacaaataaagaagggtagggggaaaggagacgcatttgggaagaggagcagaaaggaacagacgccagatggaagaactcaatggaaaaggctgcctagggtgtagaaatggaaaagtcaaaatgtggggagagacctttccatttctcaaggcaaaaagaattccagtactagcatgagtcacatgaaaacgaagtgtttttcattagtcactgcatccaattttttctaccagaaatattaagaattgttgactacaacagtatggaaaagcaatagattccagtgtgtatttcatgccaaaagtctcagcattctgcatgtggaaataaacatatggctaaacactgccttttctcaaaattgccatcaaactatcctctgttttgtggctctcaaaagtaagtagccagatttttattcaagactgctttgtagttcacaataggtttattgtactttttcaatggaattgttagaatcatcaattacacttctagatattctgacatggtacgctgctgttctttttcaggtcccatttggaagccagttctgaccagtggaagcgtctgcacctttctctgcaggaacttctggtgtggctacagctgaaagatgatgaattaagccggcaggcacctattggaggcgactttccagcagttcagaagcagaacgatgtacatagggtaggacatttttaagcctcgtgccttgcacatgttaagcacatagtaatccagtgactattttaaaattaattttgtttgaaattaagttgaatagaaatcttttttactcttctcacccaagggtcaattataaataatctaagccattacactgtaaatgtcaaacacatttgtgttaataataccctttaagaaatcgtccatctcttttggctatataaaaaaaagcttttcatgatgaaaaatattgaacatatacaaaagtagacagaatgctataataaaactcgtactcatcaagacatcaacaattatcaaatcacgtcagatcttatttattctatagctcttcccagattgttttaaaacaaatatcaggcgtgtgttattttattgttaatatttcaaaaggttaaaagataggattcactcttttaaggtaatcaccttgctactataatgcttttgaaatatcaataatttcatcatatcaaatatccagtccatattcaaatttccatttttctcatacatattatgcattttttaaactttttctggttttggtttaaataaaaattgaaatcagacccacaccttactttggttagttggtctttttattactttttgtttggaagtaattacagattcacagtaagtttctaaaatagaatagtttccctgtatctttcaccctgtttcttttcatcattatatgtcatgcaactgtagtacaattcttattgtcatttcaacatgcaatcaatagaaaaaatgtacatttacagcacatctcaattcaggctcattacattccaagtactcagtagccagatgttgccagtagctaccgattgaacagtgcagttctatagtttgattgtatttgggtttggctttttttggcaagactgcttcacaggtgttcgtgtattcttccatcatcaggaggtggtatataatgccttgttttctctttttgtgtgatgtttaatagctgttcacgatcagtggctaggggttgcagtgtgataattgcctatctctaccattccttcttcatttattcactggggtaggtctatgaaaaaaatgttttgcacttgtctcctattttggtactcagtatacctttcataccgaacaagcaaaatacgtttcaattttaccaatttttataataacaacttgttcactagcatcctccaacgatgaccaattatttctttgtttgtttgttttatttttatttacatttctatcttctctactaagctctgagtgaaaaaggcagagattttgtcttgttcacctccaagaccctagagtctagtaaagtgtctggtgtagagtggatactgataagtgttttggaaatgagaataaaagatacaagaacagaaatgaatagcaaaccaaacaaattactaccaaataataaaaacttgataaaatggtaccacttttgtatgttgagcatgtaaaggaaagatctctgtggagatacagccaaaggtggcatcttgaggaaaggtcaagggtttatattattctggagaagaggatataggaaattataaaaagggaagagaacatgaaagaagacccagggatctttgcaaaaaaaaaaaaaaatgccagggaaactgccagtttctcctttagccatttgccttcatatatttctgaatattaaattagcttttgtggtagggtgaaatgtaatggtgctatgtgttttaaatgttctgactttgaataaacagccaaaacactctggtgtacatatagaaaagcactcattgagaaggatgggccttttttaaaaaatgcattatgcgatatagtgaaatgagacagaatttctacaaaagatgaattttatgctagttccagaaaccaaagaaaatgaatcactggacatgtgcactaggagtcaggagactgagattctagtcatatttcttcataagatggattctgattgctattttgttcttcaactgtaatatgaggaaattggtccaaataattgctgtggtttcttccagccagtattttgttataaatactgcttcactattcctggttattagttttggttgcttgttaagagtggtaaaatgtctgtacttaacgcagtccttactcaggaatctcatgacaaagaacatgacttggggagatggtgatgctagagttatgagtgatactcaccagaatgaagttaatccgtccccacttggttagtgtgcttgctcagatagctacctgttaacctttcgtgaatttcacaggacttccagcccattgattactctgtgttttatacattagttcctctgcccttccatatttacctccttccaaatacaacttagattcaatcatctaaattttaataacttgttttcaaaagtctgaaaccctttgcttctttatctttttgttgctgcaatctacaaaactccaaaactctagctaaatattccgagactctaactaaatattttctcataccagacaacaatgtagttgtctggtacagtaccttttccggatgaccagccttcagccttccactaccaagacatcactgggtcaatttttttttttttttttttttgagactgggtcttgctctgtcaccaggctggagttgcaatggcacaatcttggctcactgcaacctccgcctcctggttcaagcaattctcccgcctcagcctcccgagtagctgggactacaggcacgcgccaccatgcccacctaatgtttgtatttttagtagagacagggtttcaccgtgttggccagatggtctcgatctcttgacctcgtgatctgcctgtcttggcctcccaaagtgctgggattacaggcgtgagccaccgcacctggccaatttaccttcaaaattgtttttgactgtctactattgttatcatcataattatagaagaccatttctcctaacctttctgcatctactcttgccaccctacaatgcaatctctacatttcagtcagaataatctgtgtaaaaaacataaatccaattatatcagtccttatcttaacactatagtagtcttctcagtgctcttggaaaaagaccaaaatcctcaacaagggtgacaaggcactatctggcttgtctggcctcagcctcctctttcctagatgctcttcccttgctgtttggatgccagccatactgcctccatttactttttccaattctgcgtgtccctcttatgtggggctttaaatatgttggtcctctgtctcaaacccttttacctatacccacccactcataatatcctggttatcatctaataatcctttacatcttggctcggacattgtgcaaacttttccctgttgtctacatttgaccagatctttctttacacacttctaaaattgtctacttttctataacatagcgttgtttgtcatcacgtacatgtgttactatttgataaatatcgactactcttgctaaaccatgtccttcaagaagatttttgggagggggaaagctgtcatttttctactcagcacattccaaagtgcctagtatacagtagacactggttagataaaggaaggctattgagaccaagagcagggaaagaaagaatagagtggtattcccttcttatttacaggagttttctgtttatttctaattaagcatctttttgtaaagtgtgtagagctactttgatgcacaggtttttttttattattatactttacattctgggatacatgtgcagaaagtgcaggtttgttacataggtatacatgtgccatggtggtttgccacacccatcaacccgtcatctacattaggtatttctcctaatgctatccctcccctagccccccaccccctgacaggccccagtgtgtgatgttcccctccctgtgtccatatgttttcattgtttatctcccacttatgagtgagaccatgcagtgtttggttttcggttcctctgttagtttgctgagaatgatggtttccagcttcatccatgtccctgcaaaggacatgatctcatccttttttatggcttcacagtattccatggtgtacatgtgccacattttcttaatccagtatatcattgatgggcatttgggttggttccacgcctttgctattgtgaatggtgcttcaataaacatacgacatacagcttttacttgtagtttggcgcaatgctttttcaagcttctcttggtatctttaagaaaaattcttgacacaaaacactctccttcctcaaacaacatcatcgctcctgagtgctgatgagagaacagtttagtagcctgtttgactcaaagttttgtcacatgtatgtggtagccctttcatatatggactgtctagttagtgatgctcttgaagcctatgggcaaaagaacaatggaaaatccttgaaactggatctgcgtatcagatctcctgaactcagttagaaaaagagaaaaagaacagaatcagtacaaaattccatcaagatctaatagttgacagatcttatatttgtggacttttgttttactttgccatgtttccagaattgtacattgtattgctctttatgggtttcttgatttaattgttgtttgtatagaatccttggtatcaagatgggtcactgtaattgtaaacttattccgcaagtatttagagtgccacttttttaaaaagtcatctgcttactctctattctaaattattaatatcctttgctgatgctttttatggggatacaaatcccattaaaatgtcaatagttgaaactaaaatcaaatgttgttcattttcactttcattttctataaatcaggatgtttacaaaacaggtaatttgtgtttttctttgtataccatttcagattagtgataatattttgtagcaaaatattacatatcttgtactcttttcttgtagagaaaatatacagtcaatatcaattgctgtcatggagagatatatggttcttctgtaggtaaaattccaagatactccacagacatatttggggaccatagtctcactcctcaaagcaattttcacacccatgggagtagatctgtgctccccaaaccagctgggcagcataacaactgcaactgaatggctctcaagactaattaataaaataatgctccagatgcggtgaagtgttataaataattaaagctcaaatatgccttagcaaatataaactgaccaatttttatgtcttttgaatacattatcctggcttttacagttcctcattacttgcctcactagactgactcgttttcaattagtgggtgttattctggtccagatatattttaaaaactgacttcctttgttttacttgagcagtcactaaagtgatatttattacttgtctacttctgtgattaacctagagagagttttaaaggagcaaatcatagtggggaatttctaaggagaactgcaataaaacatcagcttattcaactcccttcctcctaccccaaatccaaatggagattagatcttgattgtaacaacagtgtaggtaatgactttttgtttgcctttttactaatgaaattgtttgtcactaggttttcatctttcaattaaaaaaatctctataatcccttccctagagatcattaaggataccttcaaagcttcccgagattttctggttaagatttagatggaagtaatcaatacatacattattaaaagagtggacagaaagccattattgcttggatgctgttgacaaatgaaaaggcttgaataaagtagtttacttgttcatttgtcaggtcatatattatgcatgttcgatttcttcagaagtcaccacaaagtgagagacaggctgagaaattcaataaaattatcctgaaatcatgttgtagattatacatttatttaggctcattctgttatcagtgctggcctgcttacgtgggatacattttagtatgtatgttagcttgacgagttttctgtgttttctttttacagaaagagaaaatatctttggatgtcatttgtgaatgttaagatttaagtcagctctgtgttaagaaaaatgcgttgttccctatcacctctgaaaaacaaccaaaagttgcgatagagtgattcattcttttttcttttctttttatttattttttctttaatttttttttgagatggagtctcgcctgcagcccaggctggagtgcagcggtgcgatctcggctcaccgcaagctccacctcctgggttcacgccattctccttctcctgcctcagctgggactacaggcacccaccaccacacctggctaatgttttgtatttttagtagagacggggtttcaccgtgttagccaggatggtctcgatctcctgacctcgtgatccacccgcctcagcctcccaaagtgctgggattacaggcgtgagccaccgcgcccggccagagtgattcattctaacattcaatgacctggcctcttagagtttctaaaccacttgactgttagttatatctactctaaggtgtctttttagccgcgttggaggaaatagacgtctttttgatctattcttcatcatttttgtataagtttgatatcctatgcagtcatatttagggatgctgaatagaaatgacttaaaaattatttttagaactgcatttctaggcatttgagtcttctgaaaactaagtctaagtcttctgaaaactagctttatcatcaaaactgaagaactgagtcatctaggaattgctgctttgctttaatgactgtaacaagatgagatgtgaataatttacaaactgacttctctaccagtcttctctctcactttgtcaaaatattttgatgtcctgacaaatactctttaaaacagtatctgcatagtgttttgccttgacaaagcacttttacacacattattcatttaattacaaatgatccccttgatttttttctgtgctcttccttttgtcccccaaaaacattattttaggaaaaattataccataactcagattcctagaatttattggttctttcaagaactttttttatgaagagcctactctatgttaagcatatgttagggaacaaaatgagtctctgcccctatggatgtttagattttagtgacagaaatacatagtaaacccataaattaatatatgaaattatgttgggtagtaagtgctatgaagagaaaataaacaaagcatgaatagagaaagattgaggagtactggcctatgtgaggaggttattttggggtaaagacttgtgtgaggccgggtgcagtggctcatgcctgtaatcccagcactttgggtggctgaaacaggcagatccctggacgtcaagagttcgaaaccagcctggccaacatagtgaaactacgtttctaccaaaaactagctgggcgtggtgacacgtgcctgtagtcccagctacccaggaggctgaggtaccagaatcgcttgaacttgggaggcggaggttgaagtgaaccaagattgtgccactgcactctagcctgggtggcagagtgagaccctgtctcaaaaaaacaaacaaacaaaacctgtgtgagtgagtaaaccatgcaaaaaccttgaatgaagaggattctaggcagaagaagcaccaaattcaaaagcccaatggtaagaacaggttttgagtgttgtagaaatagcaagatgagctgtgtatctcaagggaaataagatcagtagacagtgataggttctagaaagagggaaaggccagataatgaatggtcttgcaggccatagtttggaggtggattttattctgtgagtaaagagacatcactggaagtaaggaaacatcactggaaggctctcagcagggatgatgtgatctgatttatgtgtttagaagttgactcttgctgctatggagaattgactataaaaagagcgaaactgaagacacagaaaaggagggtggtggagtcatctcagaaggaaatgattacttggactagagtggaaatgataggtatggtgaataattatttgatcgaagatatatttggagggtagaattgatagaacttaagatagatagaatgtggagtttgagaggaagcaaagagtcaaggaaaattctgaggtcaatggcttgaacaaataaaataatgatgttgccatctgagaaagacttgggaatgatcacgtttgagtgtatgtgcttagaatgaaccagggttccatttttggattatgttgatagacagacacaaagggtatgattcagatattatttaccacttatacttgacaatctcaaattttggctcagtatcttgagaacatacacaaattaatttgtcacagggttttctaataatccattcatttctactaacatttcagaagtaatttccaaatcttaaagtttaggcttaatgacctaagacctaattccctaaatggccacgggaactagattgagttttcaccagtgatctctcaaggtcagctcagaacttaacaacattattgtcagtaggaagtaacttccccagtgattgttggaagcagcccagccttagaattaagagtcaaacagctgttcaagatgctgtgtgcgcagtaaactattcctccatagtatcacagacctgcaagcaggctggactattctagcccgtgcccttgatctcagagaatacaatctttgttttcaaagacttccagaaaaataaatctcaacacagagtttgttaaacacattttccccttatacactcaaaaatgttttttcattgactataattagatttttaaaaaaaaaacataatttcaggcctgaaatatgttcatttacttttcaattttacatcaaatttattcaatctcatttataaattaatattgttgttcatgttgttgactatctgaaacaatgaatggatgtatctgatacttcaatcccttatcttcacttttattcagaagtggagtgaaaataaggcggagctttttgtcatcttatttagatgattatttagtcaaactcatagaagcagagagtagaaaaatggttgccatacattgtaagggcgagttgttgctcaatggatataaagtttcagttatgcaagatgaaaaagttctagaggtctgctgcataacattgtgcctatagttaacaataccgatttgtgcacttaaaaatgtgttaaccgaggtccggagatcaagaccatcctggctaacacggtgaaaccccatctctactaaaaatacaaaaaaagaaaaaattagccgggcatggtagcaggcacctgtagtcccagctactcgggaggctgaggcaggagaatggcgtgaacctgggagacggagcttgcagtgagccgagatcgcgcaccactgcactccagcctgagtgacagagcgagactccgtctcaaaaaaaaaaaaaaatgtgttaacagggtaaagttcatattaagtgttcttatctcaataagaaaagatgattatggccttttctttatagcccagatacccatgttcataacttctgtaatactagctgtctcaaatgactattaagggaaacctctctttctgttgtttgctccattgcctctttcttcaaatttttttcttccatgaacccctatgaatttgctttagattactgggggcaatattcttgccaccctgccatgtacatcctggattgcttgcccttttccaagacctcgcttttaagttaactgagcattgcttgtcccgaagtgagcatttggtaaaatattcttatgtgtttgagactcaataaatatggtggctctttaaataaagaaggtccttttggtgacagaatatattcagcaactttcttgtcagacatagaaacaatacaggagacataaaaaataaggtagaaataacacaggaacaagaatgatgacgtaggatggcaaaactagtaaatacagatcaagttacagatatgactgttaacatcttgttctatgcctgctcggtatccatttgttgaatgaacagaactgttggatcatcctacatttcagagcctgtctagtgtcctctcatctcctacctaatcctgcagactacagaaaaagccccaagcagcagttcaaaccatggaacttctgagtgtttggacatgaaaatctcctttaagaaatcactaggttgaagaaggcaatgctaatgggaccacttcttgaggaaattccacccagtaactcagcagtgacactcagctttggatctggaacatgagtagacctagaataagatctgtccatttttcccaatttacagcattaattttttcacttatgattcatgagtccaggctttcccctgcaagcctgttttgcatctaaatcaacttggccttcatataacacactctagtgttctaactgggtgttctgtatcttagtcaacaatgtttactgagcatttactatatgccaagctatggctatggtttttaagcatcgataataacgatgcttagcagagactctcaaactgccaccatagagcaggcctgtggccgattaatgatcttaacaaattgattatagtatatgagaactggatgttagaacttagataaggttttagcaaatgcccacattttacaaatgaggacacagaggagcaggaagagtttatcaccttttctggatcactgcagccaggttctggcccagcccaggcttgaagcccaaggcttctgccactcagaacagtgctcttttcaccacttcagcctgcctcccaggatgattctaggaagttctgcttacaaatatgggtagtatttctagtcattccatcagattttattctgaaaaacacaaatttaccatttcaatatgaatacaggtaaaattcagcgccaggcaagctgtacatgattgaaagacatctgtgttttgaaaagcacgggcttttactcacatccatagtaatatgatcctaaatccactgtccccaggagaaagcaagatagcttttctccctgtcatgtcattacctatgcccagagttctcctcttgttcctctcatgaagcaaatcaatatctcacctttcatcccctccatacgtggttctgagctacttctatttatggcattatttagatatttttataatataagcaggaagcaagagggacagaaaaaaataatcagtggccaggtgtggtggctcacacttgtaatcccagcactttgcgaggccgaggcaaacggatcacctgaggtcaggagtttgagaccagcttgcccaacatagtgaaaccccgtctctactaaaaatacaaaaaattagcagggtgtggtggcgcgtgcctgtagtcccatctactcaggaggctgaggcaggagaatcacttgaacccaggaggcagaggttgcagtaagccgagatcgtgccactgcactccagactgggtgacagagcgagactccgtctcaaaaataaataaataaataaataaaaataataataatcaataacttggttcttctctattactttcaggaattttttaagtttctgatttcttccatggccattaggattttccacttatgtggcttccaaattattctaagtcagggagattttatgttttgttatcactcactttcagcttcactttagaattgcaagatttagattcaaagtgtgtaattaactgatggccttaggtaaaccctaacttatctgtatctcaatttgcatggatgaaacattcataatataaaagtatacaccacaaatatacctactcaaccaaactattggctccttaatgacaaagattaagtctctatatctttcctaactttgtacctaataggttcaaaataaatattttttgaatgaacaaattagtgagtcaacaatcagtcacccggttggccagtacctatggtgttttaagtgcaatctaccagataattcaaccttcataataaatagatttatcttgagattatcattgctataatagtgtagtagcatacttcatataagtttattttgtgaaccttaagaagctcaaggacaaacatctgtgtagtattcctaacattttctaaattgcatattttattttcatagaggtgctctacgtctttagtattgcttctaattctctcatatcactattttggacccttgggtctggctgtcttggaaaggtgaaaagaaaggtatggggaagaggatgtgttttaacaaagataattttatctgttcaagggattcaggaagtaattatcttaacatctgaatgctaacatctgaatattgtaaatacgtattctgtatgtacatgggagaaaatatctatatctgataccttttctatcatcacataaaggaactgacttctctggtttaaaatattaaccaaaatttatatgacaaaatcagtatatatgagtatatattttctcaaacctctttcaaacaggcctttttgggagacaagacacttatcaaaatcaaggctcttgacattaaatattcttgtttgtctttttttaaaaaaaagtcttcatttttctttcttttaaaatgcaataaattatactacaacatgcagtttatggtgagttattagatactgaaaaattggctttccattattttaatgcagattctacattgctttttttttactacataaagccatttgttttaagctccatgctacaaagaccacagatgttcattgcctagaacagtgtctgatacatagtagttgcttgaagtttgttaagtgactaaattaaagaggatcttacatataaccatgtttaaaattacatattgttatttatagtttttcccacatgataagaattattgccattttctttaacctctgacctccttgaaccaactatttctctctttttgtgggagttttatccttttgtatttaatctgaatcttttgaaattctaaagatacaatcacttaaccctctcttccatccactttcttttcttaatttcaggcaacaatgtgaaaataatggtgcttatgtctttgtaataacagaactttctttgtcttttctttggcctcattttaatcttcaatgactcatatttaagaaatgaactgtgcagctgtggtggatctaagtccttggcaacaactcgatgggcaaacacgtggtctctcacaatggatgctccttagctttgaattatttactgtccagttttaacaatggaattatatcatcaaatagtgccttggactttttaagtttttagtgccttaagtttttaagtttgatgagacctttaagatccatttccggccgggcgtggtggctcacgcctgtaatcccagcactttgggaggccaaggcgggcagatcacgaggttgggagatggagaccatcctggctaacacggtgaaaccccgtctctactaaaaatacaaaaaattagctgggcgtggtggcgggcgcctgtagtcccagctactcgggaggctgaggcaggagaatggcatgaacctgggaggtggagcttgcagtgagccgagattgcgccactgcactccagcctgggcgacagagcgagactccatctcaaaaaaaaaaaaaaaaaaaaaaaagatccatttccttattttacagaccttgttccaacaattatctccaccttctgtcaaggtcgtaacatatatctagggtgaccaactttcctcgttttcctgagactgtccaattttcctgaaactattctggttttaacatcgaaagtctctcatcctgaaaaactcaatgctggacaaaccaagatggttggttaccctactgctagcttccgtctttcactctaggttcaaatcattcctatgctaaaaagaacttcttatccctttgtcttgttatcctctctgtcctcctgtcgtgtcttcctcttttccttctcagaaaaagaaaattgaacatttgattttcacttgaaatacctactccttcttccactcactcctcagctatgcctacttctgaggcttctgccctccactgaaattgctctcagcacatctagtgaacactctgcaatgctgatcttactttacttctgtgtttcattggactcacttggtcaccctcttcctctcaaaattctcactctctccttgaaatttctacactcctcatttcccctaatctctccacctatttgttccttttctatctctcaagagatcctgttcctctgtttgcccattaaactttgatatgtaggcactcaacgtatattagctgaatgagaaaataactcctaagtattttttttctcctcaaacctcagaatttattatttccttgtggaaggaatgttagctttccaagctgagcatatcacagtcccttactctgtcccccatgcacagaacaccccccccacacacacacacacacaccatcatgttgcatttttaatattactcttcaataattttatcctgaatgagcatgaggggttctgaatcagaggcagatttcatttaattaccttacagtaaatattgttgctgtgcccttcctttgcccaaagacttacccctagggcaacatgatgaacgctgatgaaacattttcctacttgagtggctgggtactccataagtgggagactaggaaaaatcattttttctgcttataaaggagaaggaggctgctatccatctctcattctgaaaggttctctgtggaaacataacaggcctgagtcctaattccagcttctgcagaaaccagctagccctgtgtgtctcatgttttacaatctggaaatgtctccaaggtatgggcttcatattttttgaaatgtaaatacctagaaagatacccactccagtctttctaacaacatagagttcagcttaggaacctaccctgagctataaccgtttgaccctcttggatcagagaaatgaactagacaaattgctacagatctaatctccatggtgtgggaagtttctcaggaggctagagctttctgtaggtgaactgagacatccaggaaagtttatttcctcatacttagttgaattgcacccagcgtttgctcatctactcaacctagacactaagtgtcattcttgtttctttttctctcttctctccagcatctattcagtcaccaaattttcacacttcagatttttagacatttccctatcctatccctgtcatttttcctggtaccattgccctgagtcaaatcctcataatcttgcactgaattcttacaattgcctcattatctctctgattccatttctgttcttctcaaatacatactctgtatttatatcaggaagatctatttgaagcacacatattcctgtgccactcccttggttaaaaccgttcaaaggttcctgattaccttcaaggcaacacctaagcctcttagtggaccatatgtgatcatagagaggcagagcttcaaattctggtttaaaaatctaatgtatttccagatagcaatagtgtctttttcatctttggacatgccctctccttgttctttatgctctagaaacactggcctgcttgagattccgatacataccatactgcactatgtcctatgactctgcacttgcattttcctcttcttggaatgttctctagcatactcttccttgaataagtcatgttcatgcttttgaattctatgtgattactagcttctcctggaagcttttcccgattttcttccccatattgcgcaagtctatagcactgtctacattgtattgaaattatttacgtgtctgactcttctattatatgttaaatattcctaaatagaaagggctgttttgcattcaactttgtatttccagtttcaggtacaaccactgacacatggtagttcaatagagggagccattattatttttataattagtaatgtcagtattaattgcctcccttcaggtccaaacagagaaactaggcaaaatgataatttacttgaatttgggaaacttaattgtatgaaaaaaaacacaagaatacaacaactgaacacacacacacacacacacacacacacacacacacacacacaaacatggagatttcaagtgaaatatcaggagaatcagctttatatgtaagcagagtaaataactcacgtatctagcatgattttagggtacagaaatatcccattattcagaaagtacttccctatctgtaggctgaatcctaatattctacttacagaactccagtattttggttcaaacgccttccctttctctattgaattgtaaatagctgtggatgatgaatcattttgcaaagtatcagactcaggattcttttgaatggtgaacaccgctaagattttattaataaatgtgtcatacaatacagctctggaacacttctgtaacataatggcatatctgaaattcaaggaagaatactgctaatttgtttttccccagtgaaagaacagggcttaaattcagcaggcaacattgctaaaagacagagttgaaaaaagttacaaaaattaagccctagatcagggcaaatattactgttattgttaaacagttatattagcatttatgtagcatgcacttaatacttttattaataccctcacttctgagatcaaagaatctgggtcaataactctcttcaatggtgtcagagtatccgttaggttattctaggctcacggtatacctcacgatccttttagcactcgattatgtgtgaacttactgttttcactctgcttctagtgttaattttctcccttctttggatctagaaactttttgaaggcagaaactattcattttgtttttctcttgatcccctggataaaggaagattacagattaaagattaattctagatctgttcatttatagaaactagtgtccgcaattcctacatccataatagctcaaaacatttctactattctcaaagaggtcacaatggatgatgtaatgactatttttcaaaagtattgagacttttctcttagcttacctattttataccttgtcagacattttgacagaattaactggtgattgtcagttggattcattgtatactttaatatagcctaaggtcctgcaaatggcccttaaggcttcccattatgttctggatatccactatttggggtatgtttaagtcctcattagccatgctagagttttgcaatatataccttgaaactttagctgtagatttgaagtatggctgtcaggttacataaacaaagcactcttatctcaatgagagggcattaactatccagaatgctccccccatctccccagaatagctttacaaacacagcgctttcctcattaacagatagacccatatagcctttaaaaaaaatcattttataaccatcagtgtataaataaaagagatagaaattgacctgggagtttcataaacaagttctgagcacccaggattaattttgagaagaatgccacaagccaaataagcacttcttttcatctcatttcacaggccttcaagagggaattgaaaactaaagaacctgtaatcatgagtactcttgagactgtacgaatatttctgacagagcagcctttggaaggactagagaaactctaccaggagcccagaggtaattgaatgtggaactataataacatattgatagaaggatcagtggtgacggagcagcccatccattcttgctgccagggtctggatagctctcatattttcttggttaaatagaatcaattcaaattaaacatagatgctgaaaaaaaaataaggactcataaactaccatgcataaatcagtttgtgcattcataaataaacatcaaaagagattagcaatcagttattggaacatttagaaaataataaacaaagggagttatctgtgaggaggaattctattgttgcaaagactacaagttaattttccatttaagagcctgcctgaagtaaattagagcttgtggtatgcatcctaacgtttttctcctcaatagcttaagtgaatcttaaattgtcggattgatataaggtagaaactcaggaagatatactttagatgttctgggctgtatcaaaatttatgccaaagtataaaaaagccgttaatcagtaggttaccctcttgttcaactgtactctttctttcttccagtatgacctttttgacaatgtttaaaaaaaaagaatgtggcctaaaaccttgtcatattgccaatttagagctgcctcctgaggagagagcccagaatgtcactcggcttctacgaaagcaggctgaggaggtcaatactgagtgggaaaaattgaacctgcactccgctgactggcagagaaaaatagatgagacccttgaaagactccgggaacttcaagaggccacggatgagctggacctcaagctgcgccaagctgaggtgatcaagggatcctggcagcccgtgggcgatctcctcattgactctctccaagatcacctcgagaaagtcaaggtaccgtctacttctttgcttcagggccctttgagagactcaaaagagcttctaatctgaacttgagtgcagtgttatcttcccacaaagttaaagctagagaaatcagtccgtctttcacaaattcagtcttcattcacatggtattttctccaagagaagacagtgatctaattatttgtctgtcttcagttatatgaaatgaaatattaaaacagttacagggcaagaaatcactttgactttgatattaagtgattgtactaaagtctgatgtgtgtgtgtgtgtgtgtgtgtgtgtgtgtgtgtattggtgtattgcttgtgttacttagtatcagaatacagaaaaataaaacacttaatcaaaagccaggagtctaggtgttggcccttttgctaaccaaattacatgacttgggtaagttatggtttggtgaaataaggctgttaatgtgttgcccttcccttggaaggcaacatttgtaatacagtttcaagtttcattggcccactgcagaaatgagggaaaatcattatatatttggaagaccactgtctataagaccaaagttaaattcccttgtggcacaaagatggcaaatatattctgtagaaaaaaatacatatttaggagtatcattttgaaatcagcaactactcatctattgtcaaaatcacaaaaatcctcctagattaaaattcaaaagaagttaaattccctcatgcactcagcatgtttgccagcatctcagcatcctcattctagaagttgtcctcttccttggctttcatggaactgttccatccatgttcttcttcctatatttttctagattcttctcctagccacccctcaaatactgttgtgcccaagtttctaaccttagcctaattctcttttgattgtttaaaccctccctgtttgagatggcctggatggtgatgtatctacatctctagtccgcatctctcttctgatctctgaatccatgtggcattacgatcacaaatgcaactattctgaaaccaagttcatttgttctcctgttttccatttccctacttctgtcccctcttatctgaccttttttttcctgtttcctatttcagttaatgaatcatcatccaacaaattttccaggctagaaactttaggttcatccttaaacccttctgcattttcactgatggcacatgatggctcatgttacctcagaatagctcttttgtgttttctctcctcttttaaccaatgtcctttttaatccccagcatcttttacttagatgataacagtatacatctttaaatcccattcacccctctgtgtgcctggcatatctcagatactgcattttaaacatttggtgaattaatggatggatgaatggtttctttgctgatgttcctgcattacccagcttcttccaattccaatccaaactccttgcgggagaatacttgcctagagaatgaaatccaatgaataaggagattacgtggcccttttcttcctagccttgacttaccttctcagccatagctcctattctccagaccatttaatacactctgcccatatgatatatatatatatgtgatggcatatttgggaaaaaggggtgatatgggcagagtgtattgaatgtgtgtgtctgtaaagtatgtgtgtgtgtgtgtgtatatatatatatatatatatatacacacacacacatacatagttagatatatacatagtatatatacatatatacatagatatacacatatatatacacatagatatagatatagatatatctgcctttgcaaatgctgttctctctgtctggatccccctacgttgtctacttggcgaattctccttcagccctcaaggaccagccaaaatgttacctatctttgttgtctttcctgagtgtctacaacccccaactcccaccaagcagaagaaactgcttacagttggtactctcatagatcaccaagcatgctaaattgtcacacttaaatttcacatatattgtagcaacttgcttatgcatttttttttctcccagagaaagtgaagttgctaagagcaaggatcatgctgtacatctttgggctgctagcccagggccagcaacatatgaggaatctcattaggtaccttcatttattcactcaacaactgtttatgagtcattatataatgtgctggacaggtagttataaaagaaacagacttgatcattgccttcatgaagcctatggtctaatgttgaattgcatagctcttcattaaaatagtaggtaaaatttttaaaaagaaaagattaaaaatttgactctaatacttgtaaaatcccttctaccccaatgttttatgaccccatgtctaacatttaaagtaagggttaaccttgctgtgtactggaaaactaagggttttgaaatgtattacctagtattttaaaagcattaaatatgttgattttattcaaaaatatagggactaattttttgacagacttctccaaaaatgagaaataagttaggaaaatgtcccagtggaactaaattagttaatatgtcaattaaattgctcaatagataggctgtagagcagacataagggattcatttttagccatacttgtcacacaggtgcatttgtaagatactgagtatggatggagaagagaatgtgtacagcataatttaataattaaaaataactaaaagcataacagttcaagtatcagctggccttcacccaaccctatttgcggtattccttttagtttccctgtcttatctgttcttggtcttaagacaaacttcattttccataccctgattggtaaaactctcattctgatcccaatgatagcaaaacatataaacattaaacatacctttcgaaaaattatatttataacccagcacatctatctttctcagacatatatacacttaagttatggtacttatctgaatttttatgtactggtaatagtagatgtgattgggcttttgaatctgtgttgtattttatgcgtgtttcaaactatgaattacatgaattcatatatatttatctcccttcggtagctcttctttaattttgcagtggaaataaatcatttttctccactgcatcttattgacactgggtttgaaactctgaagctttgggggtagtagtttacaaagaatgagttttattaactaaaatttatttcagaaaaaaagtagaagtgtacttgaaaccactcttcccatttttccactcagcaatttaagccctcagaggattcatgctgtagggaacttttctaataaaccatggtttctctttttttattttattttattttattttattttattttattttattttttttttgcgacagtctcgctctgtcacccaggctggagtgcagtggtgctatctcggctcactgcaacctccacctcctgggctcaagcagttctccgcctcagcctcccaaatagctgggactacaggcgcccaccaccatgcccagctatttttttttttttgtattttttagtagagatggggtttcaccatgttggccaggctagtctcgaacttctgacctcaggtgatccactcaccttggcctcccaaagtggattacagcactgataactaggcagctagctagaagaacattttatatatccatatcagttcattttccttacccctagacactctatcatagtaccccccctccattctgatcttatgtgttaaataacttgttattcaagaaactaagtaatatgtgtttctgtgagatttagcattctgtaattgtattagcaaatgtggcttttggatttaaagaatgggtgaaacaacaatgactaagtccctggcctttatggaaatggcattattgctagctgatcatctgcgggtggtgaacatggtaaattaataaatggaaacacaatattaatattgactatattgctcactaagagaatctcagccttccaaacatagcttccataggaaaaaacagtagaatcaaatttaagttttaaatgcttctttacttttaaaattcatgatttatactgcttatcaaatattttaagggcaagatcatgacttttcactttactgaaaatagcaccagtgcttatttgactagacaaatattctaccttccttgtaatggggaataggaataactttttgaattactaggtgttccacatagatctgtaagtggaatatataaaggctttaataaagtagaataacttttaaacctgtagtctggatacaagatttttgttcttcaggacaatcccaaggtgaaaaggtttgtggattgttgttttctttttttttttttttttgagacagagtctcactctgtcaccaggctggagtgcagtggtgagatctcggctcgctgaacctcctgggttcaagcaattctcctgcctcagcctcctgagtagctgggactacaggcgcgcaccaccacgcccagctgatttttgtaattttagtagagacggggtttcaccatgttggccaggatggtcttgatctcttgatctcgtgatccgcccaccttggcctcccaaagtgctgggattacaggcgtgagccaccgctcccggccagattgctgttttttaatgttttgtttttgttttaataaaccatggtttctctttttttaatttttttttttttgagacagtctcactctgtcacccaggctggagtgcagtggtgctgtctcggctcactgcaacctccgcctcctgggttcaagcaattctctgcctcagcctcctgagtagctgggattacagacatgtgccaccacgcctggctaattttttttttttttttggattttttagtagagatggggtttcaccacgttggccaggctggtctcgaacttctgacctcaggtgatccgttcaccttggcctcccaaagtgctgggattacaggcgtgagccactgcgcccagactataaaccatagtttctctgtaccaaaagtggtatgtccttcttgagccaggaatatttcactgttcttagtttacctgttgactctgaacacagtttttcatacactgtaaataactctcccaggctgccatcttggaatatgcaaatctgtcgcatctatgtagttatgcatatcgcatttttgtcaaacttttaacttgcatttcttactgtgaaaagtcagggcagggattctatgagttttttctttaaagttcctacaatgaaatgttttgattaaaccttttttggcattcaaattgagattgatttaatgatgtgtgtagtaggctagaaattatgatgaagtgacgatgccatccttatttatcttcagcattcacatctaaagttttaagaagaaaactggcaaatccacctttttaggcttaccatcctcagtccctgtggctttgggtttttttgagaaatttgtcaaagaaacgctatgttagaatttgacattgaggaagccaagcatatttcctctgaatagataatgtgaaatgtgatataatgtattagaatttcatcttcactttggcaagcaagatacttgcaaccatgttcatgcaactatcttcccttattgcttttctcttcttaaccttggttctaaagttttcttcttattgtattaattttgttatgcttcccatttatatgagtcaagtcaaccttacttgatttcttatatatgagttatgtaaggaaaacttatcttttcttatagaattaggggatgaatgagcagatagaaccaacatgaacagggcgatcctaaaaatcattcaaaacatgtaagctctcccaactctgaataaacttgtgatatcttcataatgaataaggtatactgcctatagtaggaagaggaaaatttattaatgttttgtgcattgttaaagaactacaaatgaattgccgtgtggaggctttcattgttgttgttgtaaaaatgctatgtgtattaagtaagcctttgatggagaagaaaaaacaaagaaaaaatatttaatccttcataaatctgggttaaatatgaagctaattcctgttatttggagtaaccagggttttatctagtttacaaagcatgcaattgcaatgtttaaaagcatatgatttggcctttaatatctgaaaatatgtctatcaaaggccatattatagcgagtgtcactccatactttataagtacggtatatttttaatagaatgtttatgtactggtgataagagatgttactgggtttctaaaccagtactgtattaaggattttatgctattgtaagattatggattatgtgaattcatatatattgatttactttcagtagcttttcaatagaatatctagggtttaatacagcttagaaactaaagcaggaattattcatctttaaaatcctgaccaaagaagtggctggcaagatggctgaataggaacagctcaggtgcgcagcccctagtgagatcaacacagaaggtgggtgatttctgcatttccaactgcagtacccggctcatctcactgggactggttagacagtgggtgcagcccacagagggcgcagaagcacggtgggatgtcgcctcaccccggaagcacaaggggtcagggaattccctcccctagccaacagaagccgtgagggactgtgccctgaggaacggagcattccagcccagacactatgcttttcccacagcctccgcaacatgcagaccaggagattccctcgggtgcctacgccaccagggccctgggtttcaagcacaaaattgggcagctgtttgggcagacaccgagctagctgcaggcgtttttttcatatcccagcgtcacctggaacaccagcgagatagaaccattcactcccctggaaaggggactgaagtcagggagccaagtggtctagctcagtggatcccacccccaacggagcccagccagctaagatccactggcttgaaattctcgctgccagcacagcagtctgaagtggacctgggatactcaagcttagtgtggggaggggcacctgccattactgaagcttgagtaggcagttttcccctcacagtgtaaacaaagccgtcaagaagttctaactgggcggagctcaccgcagctcggcaaagccactgtagccagattgcctctctagattccttctctctgggcagggcatctctgaaagaaaggcagcagccccagtcaggggcttatagataaaactcccatctccctgggacagagcaccacggggaaggggcagctgtgggtgcagcatcagcagacttaaacgttcctgcctgctggctctgaagagagcagcagatctcccagcacagcactcgagctctgctaagggacagactgccttctcaagtggggtcctgacccccgtgcctcctgactgggagacacctcccagcaggggttgacagacaccctcatacaggagagctctggctggcatctggcaggtgcccctctgggatgaagcttccagaggaaggaacagacagcaatctttgctgttctgcagcttctgctggtgatactcaggcaaacagggtctggagtggacctccagcaaattccagcagacctgcagcagagggttcctgactgctagcatcaacatcaacaaaaaggacgtccacacaaaaaccccatctgaaggtcaccaacatcaaagaccaaaggtagataaatccacgaagatgaggaaaaaccagcacaaaaagcctgaaaattccaaaaaccggaacgcctcttctcctccaaatgatcacaactcctctccagcaagggaacaaaactggatggagaatgagtttgacgaattgacggaagtaggcttcagaaggtgggtaataacaaactcttacgagctaaaggagcgtgttctaacccaatgcaaggaagctaagaaccttaaaaaaaaggttagaggaattgctaactagaataaccagtttagagaggaacataaatgacctgaaggagctgagaaacacagcacgagaactttgtgaagcatacacaagtatcaatagccaaatcgaccaagcaaaagaaaggatatcagagactgaagatcaacttaatgaaataaagcatgaagagaagattactgaaaaaagaatgaaaaggaacaaacaaagccttcaagaaatatgggacgatgtgaaaagaccaaacctacatttgattggtgtacctgaaagtgatggggagaatggaaccaagttggaaaacactcttcaggttattatccaggagaacttccccaacctagcaagacaggccaacattcaaattcaggaaatatggagaacaccacaaagatactccttgagaagagcaacccaagacacataataatcggattcaccaaggttgaaatgaaggaaaaaatgttaagggcagccagagagaaaggtcaggctaccccaaaggaaagcccatcagactaacagcggatcatttggcagaaaccctacaagccagaagagagtgggggccaatattcaacattcttaaagaaaagaattttcaacccagaatttcatatccagccaaactaagcttcataagcaaagtagaaataaaatcctttacagacaagcaaatgctgagagattttgtcaccaccaggcctgccttacaagagcttctaatgaaggaagcactaaatatggaaaggaaaaactggtaccagccatggtaaaaacataacaaattgtaaagaccatcacactatgaagaaactgcatcaactaacgggcaaagtaaccagctagcatcataatgacaggatcaaattcacacataacaatattaaccttaaatgtaaacaggctaaatgccccaattaaaagacacagactggcaaattggataaagactcaagacccatcagtgtgctgtattcagaagacccacctcatgtgcagagacacacataggctcaaaataaagggatcgatgaatatttaccaagcagcaaatggaaagaaaaaaaaagcaggggttgcaatcctagtctcagacaaaacagactttaaaccaataaagatcaaaaaggacaaaaaaaatggtattacataatggtaaagtgatcaatgcaacaagaagagctaactatcctaaatatatatgcacccaatataggagcacccggattcataaagtaagttcttagagacctacaaagagacatagatgcccatacaataatagtgggagattttaacaccccactgtcaatattagacggatcaacgaaacagaaaattaacaaggatattcaggacttaaactcagctctggaccaagtggacttaatagacatctacagaactccccaccccaaatcaacagaatatacattattctcagcaccacatcacacttattataaaattgaccacataattggaagtaaaacactcctcagcaaatgcaaaaaaacagaaatcataagagtctctcagaccacagtacaatcaaattagaactcaggattaagaaactcactcaaaaccacacaactacatggaaactgagcaacctgctcctgaatgactgctggataaataaggaaattaaggcagaaatgaataagttctttcaaaccaatgagaataaatacacaacggaccagaatctctgggacacagctaaagcagtatttagagggaaatttacagcattaaaatccccacaggagaaagcaggaaatatctaaaattgacaccttaacatcacaattaaaagaagtagagaagcaagagcaaacaaattccaaagctagcagaagagaagaaataactacgatcagagcagaactgaaggagatagagacatgagaaatccttcaaaaaatcaatgaagccaggggctggttttttgaaaagattaacaaaatagatagactgctagccagactaataaagaagaaaagagagaagaatcagacagacacaagaaaaaatgataaaggggatattagctctcatcccacagaaatacaaactaccatcagagaatactataaacacctctacgcaaataaactagaaaatctagaagaaattgattaatttctggacacatacaccctcccaagactaaaccaggaagaaatcgaatccctgaatagaccaataacgagttctgaaattgaggcagtaattaatagcctaccaaccaaaaaaagcccaggaacagatggattcacagctgaattctaccagaggtacaaagaggagctggtaccattccttctgaaactattctaaacaataggaaaagagggactcctccctaactctttttatgaggccagcatcatcctgataccaaaacctggcagagacacaacagacaaagaaaatttcaggccaatatccctgatgaacatcaatgcgaaaatcctcaataaaatactggcaaaccgaatccagcagcacatgaaaaagcttatccagcatgatcaagttggcttcatccctgggatgccaggctggttcaacatacagaaatcaataaacataatccatcacttaaacagaaccaatgacaaaaaccacatgattatctcaatagaagcggaaaaggccttcaataaaattcaacaccccttcatgctaaaaactctcaataaattaggtactgatggaacgtatctcaaaataataagagctacttatgacaaacccacagccattatcatactgaatgggcaaaagctggaagcactccctttaaaaaccggcacaagacaaggatgccctctcccaccactcgtattcaacataatattggaagttttggccaggacaatcaggcaagggaaagaaataaagggtattcaaataggaagagaggaagtcagattgtctctgtttgcagctgacatgattgtatatttagaaaaccccatcgtctcaacccaaaatcttcttaagctgataagcaacttcagcaaagtctcaggatacaaaatcaatgtggaaaaatagtaagcattcctatacgccaataatagacaaagagagtgccaaatcatgagtgaattcccattcacaattgcttcaaagagaataaaatacctaggaatacaacttagaagggatgtgaaagacctcttcaaggagaactacaaaccactgctcaaggaaatgagagaggacaccacaaacaaatggaagaacattccatgctcatggataggaagaatcaatatcgtgaaaatggccatactgtccaaagtaatttatagattcaatgcagtctccatcaagctaccattgactttcttcacataattagaaaaactactttaaatttcatatggaaccaaaaaagagcccacatagccaagtcaatcctaagcaaaaagaacaaagctggaggcatcatgctacctgacttcaaactatactacaaggcttcagtaaccaaaacagtatggtattggtaccaaaacagatatatagaccaatggaacagaggcctcagaaataatgccacacatctacaaccatctgatctttgacaaacctgacaaaaacaagcaatggagaaaggattccctattcagtaaatggtgctgggtaaaccggctagccatctacagaaaactgaaactggaccccttccttacaccttatacaaaaattaactcaagacttaaacataaaacctaaaaccataaaaaccctagaagaaaacctaggcaataccattcaggatataggcatgggcaaagacttcacgactaaaacaccaaaagcaatggcaacaaaagccaaaattgacaaatggaatctaattaaactaaagagcttctgcacagcaaaagaaactatcatcagagtgaacaagcaacctacagaatgggagaaaatgtttgccatctattcatctgacaaagggctgatatccagaatctacaaggaacttaaacaaatttacaagaaaaaacctaatcaaaaattgggcaaaggatatgaacagacacttctcaaagtaagacatttatgcggccaacaaacatgaaaaaaagctcatcatcactggtgattagagaaatgcaaatcaaaacacaccagttacaatggcgatcattaaaaagtcaggaaacatcaggtgctggggaagatgtggagaaataggtgtgcttttacactgttggtgggagtgtaaattagttcaaccattgtggaagacagtgtggcaattcctcaaggatctagaaccagaagtaccatttgatccagcaatcccattactggttatatacccaaaggattataaatcattctactataaagacacatgcacatgtatgtttgttgcagcactgttcacaatagcaaagacttggaaccaacccaaatgctcatcaatgatagactggataaagaaaacgtggcacagatacaccatggaatactatgcagccataagaaaggatgagttcatgtccttggcagggacatggatgaagctggaagccatcaatctcagcaaactaacacaggaacagaaaaccaggcaccgcatgttctcactcgtaagtgggagttgaacaacgagagcccatggacacagggacgggaacatcacacaccggggcctgtcgaggggtgggaggttaggggagggatagcagtaagagaaatacctaatgtagatgacaggttgatgggtgcagcaaaccaccatggcatgtgtatacctatgtaacaaacctgcacgttctgcacatgtatcccagaacttaaagtataataataataaaaaaaaaatcctgaccaaattatttattcaatgtgaaattaattgtaagttagtgttgccaggagagcttattacttagttaccatgtattccctctcatctcctgctttgtttataaagctaaaagcaaattacttaggacagcaatgtcaaatcactttctttccccaaagcatctgattttagatagcgctgtgtgtgttttaaaagcccctacctcgacttaggcaaacagaaccttcgtttaccatgctattcccatcccgcctttgaaacttctgaaaaggcagagcggagtaattgtttcagacatctgcttagcatactttgaagtgcatataagttctttttcagtttcatttgaaccccagctgtcttcaccgaagtctataatcaatctgaattaagttgtcctacttctcctaataagtctcttattaagttctgcatcagcctcttagggagacttaaaagctaattcatgtagaattgccattttctactaattcacttgtcagctctccaaattccaacaaaaacaattgcaaagactattaatttggctcttcataaacaacttatgtaagtgtagtatacattggaaccaaacaaacgatttaaaacagtgggtgggaggaaatgagttgatggcattcaaaacgcttccttttttgactgttatgaaatgccttccacatcgaaagcataaagccatttatttaataagggaaacatccttctgcttttactttcatagatgagataatgactgaatgaactttgcttaaagacaggaaaaggctttagaacagttggaaaaggaacatgttctttttgtcattgaacttattttaatttggacttctttgtgttattttgatggactgtgataaaagaaggagctagaattggttattattgttattggattaaatcagagttgtacagctactcttctggtcatgggatatttaggagaacacgggtaatcaaaatgttcagctaatgagttcatctgattctactcaagaagtgtttaatcagataataaaaatttctccaaataataccatccttcctactatttgaaaacaaccatatcaacatctgatcctataatatgccaatcctgtttgctaggattttctgaaagctttgtttgtggtgggtaataactagaaatactattcctcaagagtctcgggtaataaaagattattcaaaaaacttaagtaatatactctcagtattagaggatatacaaatgcactcattcattaattcatgatatgattgaaacctatacccagagaagtctgatctcattatagagtgtgaacatttaatttatttcaaaaacaaaaattatattgagagttgtatagatggcatcttagttttcctgggaatattattatttagcaccaagctgagggagcaagaatttgtattagcttgtgtatacatgtgcatgtaccacattaactagaaacagtgctaaaatgtgagttatttatttaactgaaattccatatttcctaagaaaatggaatcacacagccaatatatatttttaattattttttgacatctaccaaagttgtgacaagaataaagttcacaattctgttactctcctaccgttcagtaaaacaggaaatgctttaagatcaaataacccaaggagttcgcttcttcctgtcatgcttgacaattacaattttcaaaatttaacagttagcattgacaccagtattatgccttacacaacctgaaattaactaagttaagtaatggcattgaataatttttcttggtaaatcagttttctgggtattatgggaacagttgtgtctgtgatactaatgtctctctcattttaatggggcctaagaaagaactttttcataataagattttttcatgttaaaataatatttttagttatagtttacacttactgcaggtttttctatttaaaagcatcttccgagagcagtgattcttaaacttatttacttcagttatcttaacagcatagaagacatagcctgacatctcccgcttccacttacctatctcctttttccatgagcatgaaatttctttgatgttcttgttttattttttaaatctcacatcaattttatggtattttccataatggattcatcatgttttaatatgaagatgctttttcttcaaattctgaagtaaggaatctttcagcacattcacctatggacatgaaagcgtaagttgagaatcacagtataaaggattgcccagtttttgcaggctttatctttttccatcaacttctgtcttttatgtacacagacaaaaagagcagacccttgctatttcaaatttatcttttgcaggttcatctgattattgtgatccaaagttccatgactagcagctcttaattttgaacatgtattatttcaagcttttgtgcatagtcacttaactaatgagttaaatggcattttaagtcaggttccatgaacgcagaccctgagaacaggggtctaggtgcctgtgatttatagagggtctgctctcaggagaagcctgtattggagttagggaaacaatacaggagaagaaagagcccagcaagtatgccatttcaggtgaaacctcacattgtgtctgatccagagagagagcaagccctcgagcagaaacctcgctgtggagttgtactctttattttattttatttttttgagatggagtttcgctcttgttgcccaggctggagtgcaatctcagctcactgcaacctccgcctcccaggttcaagtgattctcctgcctcagcctcctgagtagctgggattacaggcatgcaccgccacgcctggctaatttttgtgtttttagtagagatggggtttcaccatgttagtcaggctggtcttgaactcctgacctcaggtgatctgcccacctcagcctcccaaagtgctgggattacaggcgtaagccacaacaccgagccggagttgtgcctttataccagtcattgtctgtgtcactgaagtgctggcaaatatttgtcgactagctctgaggtgggatgaatcctggtgtgtatcaaaaccagttttcgtggtgtaaatactccctctaccactgatctccagctaccgacataatgccactgagtatggaattgggaggagatgcacacaattggctcttgggctctgctgcagcacaccactggctgtggtccactcctgggatatgggttacttcctgggctagggggctcccataagcagaggtcacatgtggagaaggcaggtagctataagacattaatagtcaaccatcacagcagctgaaggatggatgcccaggttaggtaaagtgtcccctgcaactaataagtaaacctagtaatccactcactcttcatattcaacttggctttttttaatgctgttttgtttttgcatgtacagtaattctttataaataatgagaattttgtttctttatggaaaatccacctaccctccaccctaccatgaatagcttgatagctgttcatcagaattagtgatggaagagaagagttaatgaatgaaaaagtctaagaaagtgatcactattagtaagaaaatggcctcataagtgagtttggctttatagttatggaatctgtaaatgtctaggcattcagacatgtccagacatcattgagaatgtcaagaattttcagtggcaatggttctcacctcagcatacatcagaatcacctggagggcttgtagaaactcaggttggtgaaccccttccccagagttcctgattcaaaatgtctggggcaaggctaagaagtcccaacttgttcccaggtgttcatgatgctgctggttcagagatacattctgagaaccaatattccatagtaaagctactgtgtatgtacctgaagacatattttgtgtagtgttagcgtttcttcaattacaagtaataaatatatcatttattatttcttttatatttatcaatatccagaagatttagtttaaaaatgaatgcaggcacacagcctcttgttggattgattaatagtttagatatgggagcatcatagggagcattgtttcgcttaggaaccttgaaatgaataaatggcttcttttctaaatctcacttgtggaagactttgacggtggtttatttcattttttcctgttggtattttaatgacactggtacaattttggggttgcttcagatgaccaacagcataacttgccttcccagtattaatttttaacgttaaaaatatttagtcatggccggccgtggtggctcacgcctgtaatcccagcactttgggaggccgaggtgggtgggttgcatgagctcaggagtttaagaccagcctggacaacatagtgaaacctcgtttggacaaaaaatacaaaaattaaccaggtgtggtggcatgtgtctgtagtcccagctacccgaaaggctggggcaggaggactgtttgagcacaggaggttgaggctgcagtgtgccctgttcactccactgtactccaggctgagtgacaaagcaagaccttgtctcaaactatatatatatttagtcacataacttttcactttgtgtaaatattttttgcatttaccaataaaaacaattacatttaaaaattctccttacacttttctaccaaacatactgatgataaaatagtactttatagagtttctgaatctaggatattaaaaatagttgggatcagtcaacactttttaagtaaaatctacttgctagatatgaatagctaacagcttctccaggagtgcctacattttataacttactttgtccaccccttgaggctctgtgttcagggggagggtatatttttgtgtatagaaatagagatgaggtgaaatagagatgaaatagagatgatgtgggatcaactgggagaaagtagaaaagagtcttagctgaagtggttgaggaaggaggatttttcccaaaatggtgcaaaaaacaatgtattaaatatctgtgaaaaagttcatggttgtggtatagggtgagtggtatatgaaaagagaattatgggataaactaatggaaacagatgtcttaaaatttgcttttaactttaaacaagagacatgaaacttaaacttttcccttatcctagaatctgggagaggagaaggatgagaaaaaatgaaattttacattagaagcaatttgattaatgttcaatggaaaatggaaatagctatggtcaaacccactcaaatcaagtgtacattaaataattgagttaactgaattaggcagagtaagggcacattgattttcagtgttgttgaaaattggtccacatatcattgttatgctttttgtttgtaaacctcaatatttattaagtttccacagtgtgctcagccctgaaacgccaaattctcttaaccagaatgaggctggaggatctaacactaagacagatttctattttcttttaaggaattgatttttatggtaattttttttcttcataaagttaagaacctgccagtcctgtttcgaaacacacttatttttagaagtttggttttccgggattatgcatcattatagactcaaatgactcatttagaacttttccctatcaaatattcacattctatcatcatgatcttaacacggcataagcaagttagtgaacagagtgaagtcaatttattggcaatatatgccgaagtacaggaattaagtagaaacaaaagtgaatgagagtctttggcaatacattgatgtgttttttttagaaccaatgataaactactgctgagtttcctttcatttacttttttcctactcttaaaacattgtaacccattttgagatctatccattgttgtgaacctaaagcctattaggtcttattaaataatacccatttaactgacctgtgatttaagtttcttatctgcccccaagcaagcagactgtatgcaacggcattttacctgcttcaccttctgcttgccagttggtttttggtcttcacatgtttctagcagggatggggctaaagcaagggagagaatggtccattgttttagactttcacaaacccaatatactagaatctccacaaaggttatccaatatcagggtgacttttgtgcatccaataaagcataaggttaaaagaaatacaggctaaacaaatgagcataaattactccgttggcttatgctgtgaataaaatattacctttggaaccatctcaattttttttttgtataaaggttgaaggaagacatttgcaaagtcgtttctcctataaaactgcctagggtttggggttgattgttgtatgcaagaggggtcttggtgaaatctgacccactttgaatctaaaattactgaattattagtgaaaagattattttaaaaagagttttgaactctttttcctactgaaattgtattctcctttagataatcaatgcagcatcacccccacagatttttgagggcactaaatcatactcctattttgaaaaagaaaaaagtctattactattaaatatatctgttagttgaatatcaatcactttttctaaagggtagatttggccaatgagtgatttttttttttttttttttttggaaatcacatctgagaacgttgtttagacagcttgacacttagactcatttgtgtaagtagtaatttattcatcatttgcatgtacttaactggacattatcatgatagcagttgtcataacagactattacaggatatgaatttagatattaccttaagatgtgatcataaaaatcagaataatatcttgaaaatatcaattttatggtgagaaaaatgacaaactgaataaactcttgactcaagaagctagacttttcacaacctcatgtattcacagaagtaaaaataacaactaataatgtgtccagagggcccacattgctcagaaatgaatacataagactttcttttcagcctcagaatatgatgaaaagaagatgaaccattatgatgttgcatagattttaatgaagaaaattcgttttctgttcctttcgtttgactttaagtagttgaacatcctgcttttttattttgtttgcaagaaataagaccattttagaaaggctaaaaacattaattacatttaggaactacaataatctgaaagtaaaattggatattaaaggacgtttttgcaatcctttttagccctcttctgtgtattatttttatcactgctcttaaaaatttgtattaatctttggttcatttctgccttagtatttctaagttaataatatattgaatgaaaaatcaaatcagtaaaaatccattttgtttcagtagtgagtgccttccccctagaaccaaaactaaataaatgtgctccatataaagcaaaccaggtacagcatattgcacgggtaactcacaattctagattcctctattaatcattattcagacatgcagaggtagcttaatttgctttaataagtgaaaacagaatctctttgagactgctatctgcaatattatactttgtcctgcattttcttggtcaaaaattgtattttatagccatgatatattttggcttggaatttgcttctttataagcctagttattaatagtcatcatttaaatgaaatgatatccattagccttaagctgcatgattacagagacttggtctatcttacgctgtatttccagtgcctagaacattccctggcatataataggtacccaataatagtttttggaataaatgaataaacaaatttgtgcaaaagcatagggcaaaatgctatcttttagatagcgtgacccttaaaaattattttgcaaataatttgctccatttgccaccagcttatttctggccattgttacttcttgtctctgcatacaaacactctgtgtctcttctcctttccacaatgaccacaagttatactgatctacttgagattttccaggtgactatttcatgtccagaggaacatgcctcttctagtgttcccctctgtgaatgatttcagtcaccttatctactcaggaggtctctcttcccctccatcagcatctttctctgcaccttccaaacccctatgactcaacttctcataatatggattgcattttttttaatgacccattaaattgtgtacctctgctaatgattgtgagtgtgttgagacttccatttttccagtggatgataggtatataatatatatatatatacacacacacacacacacacacacacacacacacacacacatatatgtgggcacagtatctagtggatataaagtaagtgttttcaagtgagtagtaattaaatctaagagttgccgagaaaatgccattcccgttttgtggacatcttcattctacattgtaaaggccacctcattcaagacccaccacaatcttgatcccagaaaacacccatgattcatcttttacagctgccctgtacttcatattttaagttattaaaggctatttgcttttcctcagacacacattaaactttcctacctcttaccctttgttcaagttctgaacacatatctttcttccccacactatgcttcctctttatcagtttcatgtacctactttccaatgtctagttcgaggagacgtttataaggctacatgatagaggttgcccctggggcgatgtgagaaatcagctccaaaaaggtagctacccggcaaaggatcttagtctgtgactctctcatggatgaacttattacctactgctttgcagagtctccctggactagcctgaataggaacttgtgtgactatatgtgaactaaaagaaggagaaatatgcctaaacttctcatccatctttgtaacagccctaaagtatgcatgttactatcccttttctacacaagtggaaaatatttgtaaatgaacttcgttacagtctaatatttgatgacttcttagttcatatcattatttaagtaacttttctttagtggaaaagcccaaaaattagggaggcagggagagagagagagagagagagagggatcatctgtaatctcagccccagcatctataatcccaatccctgcaagggcctctttgggcaaagaagaaaaaggcactgtgtttttgaagagatccccggtcctatgccaagcctaaccaatttggtagtagagcccaggctggatttcagttggtttgtagtcttctagtcttttcatatgtaaatatttttaatgcttttattcagtgttgttaaaatgccctccaaaagatgcactaacttgtgccaccaccaccaagcagaatatattttccttgaataggctacttcctctttttttcccactcactccatttttattttaaaaatccctggtagagaccaaaaactgaaatgttatattcttgcccaaagaatgagagatgcttcagaaattagcaaatgctccaatataaatcaagtgatagatataaataattcagatatgggataaggaaaatgggtagctttctcttatttaggaactctatgtcaggtttctgtgagaaactgtttacgaagcagtctgacaatagctattggtctgaagtattagtaattagtacagaagtgcctaattctcttgactgcttgttctttaataaaaatgtattgagggattatcatgtactatggcttggcatatactggtgaaaaacaataatgtaggattgccttaataaattttctggtcttgggaaggaacagacaatgaataaatgaataggcaaatatatatgtacttgcaaattgtgatcagggttcagaaggaaaatagggtgttgagagtcaaggaaaaaggagacactttacgtagggcaaccaactgggaataggctatctttaaaagtcacatctaactgagatcagaagtatatgaataagagccagctaggcataaagtggatatataaaactccaagcagagggaacagtgtatctgaaggttctaagtcaagagtaagcttgggccaggcacggtggctcatgcttgtaatcccaacactttgggaggccgaagtgggaggatcacttgagcccaggagtttgagaccagcctggaaaacatagagagatcccatctcgcaaaaaaaaaaaaaaaaaagaaaaagaaaaaactaacttaaaaatatatatatatcaatgccagtggtgtgtgcttgtagtcctggctaacttgggaggctgaagcaggaggatcgcttgagcccaggagtttgaggctgcagtgagctatgatcgcactgctgcactccagcctgggcgacagaaagaggccctgtctgaaaaataaaataaaaataaataaagaaataaaaagcttgatgagttctaggaactcaacattttctaacttcttattagaaatgccaaattctcaggcccaccttacacccactgaatcaaaagcactaagtgggactcagcagtctctgtgttaacaagccttccacatgacaatgagatgcacactattgtgtgagaatcactgccttagactgatgttttgagctatttaggggagggagagggcccattcagggacaatggtggttaacacatgtggctcagaccaagaaatgattgcaagcccaaaaacttgttaaatgtaaaacttcaggcgcagtggctcacgcctgtaatcccagcactttgggaggccgaggcgggtggatcatctgatgtcaggagttcaagaccagcctggccaacaaggtgaaacccagtctctagtaaaaatagaaaaattagccaggcatggtggtggtgtgcgcctgtaatcccagctacttgggaggttgaagcaggagaatcgcttgaacccacgaggcggaggttgcagtgagcccagatcgcaccattgcactccagccggggcgacaagagcaaaactctatctcaaaaaaaaagtaaaacttcatctgtctgaagtaacttctgaatttgaagataaacatcctcatggttgatattttaatggtttatggattattacttacttttaaggaagttaataggtttcattaactgccattttgcttcattttgtcacatataattaaaatttttcagacagaaaatattggtattttttctgtttccttagcaacctaaagcatgacctgcttaaatgacttatttgtgctcattaaaagcctttttgtgttaattgtgtatattttgtatttagcctctgtgaaacactcatgaactatctttttatttgttttaattgtgtcattggaaagcttgaagtattttgtggtttttttttttttttttttttttttgcttgttttttgtctataaaggggagataactggcagttgcagttaggattatagaaacattttcccaaggaaattaataaaatttgttcaagtttcttcttttacaaattgtacttatttttgattttttaaatagtggtaaaatacaaattacatgaagtttactatcttggctctatttaaatgtatacttccatggcattacatacatttacgttgttctgctgccatcaccaccatccatctccagaactcttctcatcttgcaaaactgaaactctatgtctattcaacgataatccccaccaggcatggtggctcacacctgtaatctcaacactttgggaggccaaggcaggcggatcacctgaggccaggagttcgagaccagcctggccaacatggtaaaaccccatctctactaaaaatacaaaaattagctgggcgtggtggtgcacacctgtaatcccagctacttgggaggctgaggcagcagaattgcttgaacctgggaggcggaggttgcagtgagctgagatcgagatcacaccactgcactccagcctgggcaacagagcgagactccatctcaaaaggaacaaaaaagaaaaaaccacagtaattccccattgcttcctgcccccagcccctggaaaccaccattctatttcctgtctataaatctgaatactcatttctatatcttctttggagaaatgtctattcaggttacttgctcattttttagtcaggtgatttgttttcttgctattgagttgtaggagttccttgtgtattttgaatactgaccccttaccgggtgtatggtttgcaaaatatcaattgctcctgctatgttcaacttgttcttaaaaataaaaacttttcctttgtggtcaatacttccctgttcctcatttccaaattttatacatgaaggaaatgtgagcacccagaaaagaaagaagatagacactgttaatatggccaagatataattcggcttttattataagaacattggagttacaagcttcatagaaagccatgtcctaaaagatgaagaattatgatcagtgcaaagagaaaatgttaaaaagaaaaagttatccttttatgtttgggtatatattctttttcgatattgtaaagagaaactagagttttttgttcttgtttttgagacagagttttgctcttgttgcccaggctggagtgcaatgttgcaatctcagctcactgcaacctccacctcccgggttcaagcaattctcctgcctcagcctccagagtggctgggattacaggtgtgcaccaccatgcccggctaatttttctgtttttagtagagacagggtttcactgtgttggccaggctcgtctgtaactcctgacctcaggtgatccacccacctcagcctcccaaagtgctaggattacaggcgtgagccaccgcacctggttgagattgttttttataaaaagatgtggattctttatggaaaacacagagcagttaattgctatttttttaatgtcacaaatttggaagcgtgttgagtctgagaagaaaccatagttaaaatataattactgataatcgcttgggaaataaaagccctaaatttcttcatgcctacaaacttaatattgttttcccaagatcttttttttgactttaacctttcttaagtgtttctgattatgctaaatctaggccattagttctgagtctgtttcattatttatattgttattcagtttactcgtcaaaagtgatcatgcccaaatatgaaagtttacaagaattgccctgaaaactgaacggaaggagacaacgaaaagaaactgcataatattttgccttcaggctatcacaataaaaactgttgctggaaaaaaatgcaatcacatcccttttttttttttaaagtacgtttcaatggcataatttattgtcgagaatgtctctaccagaagcataagtgatactaaaggcagagggttgtattcgctcagtctgcaaagtatcccctttgtcttagctccacacagtccctcagaatttggcagaaatgagggactcaactttcgagaaagggtgacaatcccagttttgttggagagctatgaaatagccccatagtgttagtaatgaaaattcacttaagaagtctcctgcaggcccggcacggtggctcaggcctgtaatcccagcactttgggaggcctacgtgggtggatcacctgaggtcaagagttcaagaccagcctggccaacatggtgaaaccccatctcttctaaaaatacaaaattagccaggcgtggtggcgggcacctgtaatcccagctactcaggaggctgaggcaggagaatcacttgaacccaggaggtagaagttgcagtgagccgagatcgtgccattgtactccagcctgggcagcaagagtgaaactccaccttggaaaaaaaaaaaaaaaaaggaaagaaaggaaggaaaggaaggaaggaaggaaggaaagaaaaaagagaaagaagtctcttgaaaaaaagaaaggaagaaagaaagaaagaaagaagtctcctgtataaaaaaaggaaagaaagaaaagaaggaaggaaggaagaaaagaaaagaaaagtctcctgaaaaaaaaaaaaaaacaaaatataagtgcttgacaactgaagttcaagggtaaaggctattgggaaagcagatgaagttaatctaagtaatggatgctgttggtgccccagtcagattcgttcactgggttggtgcacccattcctcagtgactctgagtattagctgctaaagcctcatggtttcacccctttccagagaacctccctcagccaaaaggaagccaccttgactggcatgtcccaccacaccttctctcttaaaaccaccaggggtacaaagggaaaacccctttgcctcatcatggcacctgctgttgtacaatttgtgatctgggaattcccatggggccagattgatgctggtctccagcccataccacatcccaacttaactttcttgccctgtcttcctgcttctctcactccctttttcttaagagcactcagactctgcttctcttaaacctggctgaaggcagtaggtatctgaaagaaaagctgtacctacattctgggcatcagagcagtcagggaaccaaccagaatgaaaagtcaaaaattacagataatgatggaagtctctgagcctgatacatttcatgaagggcttgcttacagctcaacttgtgtttctttttaattgtttcaacagcatttgagtagctcattccgcccaggtatttgagagattccagtaggcctctgatcctctggaaaaagcaagatacagtccttgactctcttggccccatgaggatgatatatctgctgagaaatgcaggagctgcaaaacatagctgggctgtacctgctgccaattcccgggtaattgcattctgtgagggcttccctgaaccacgaggaagagccccggaataagtactaaacaccagtatttataggacatgatttctaattgctcatccttgccttctcatgactagctcagcatgaagaatgctgggacttttctttcctagcacctcctctttttaggctgttttccaagagtcttggttaacaaacatttgtttgacaaggattcatggtagacagcaatgccattagtccctacttaagtaatatttgtaacataaatttctctgcacgtgtatgtagcccaagaataacacttcatttttggaacctagtaattttgaattcctagtaagtgagataggacgtctatgagttagcaggttaagattttaggaggaatatttaatatccctaagaagggaagtttttcaaacactgagtagcactatatatatttatatatatatagccagatttctatctatctatctatctatatatatatatatatatatatatatatatatatcacaccatttataaataaactcataagtggcaaatccagtagagctaatctgagcatcccagagtctcccctctctgtcgcttgtttgtgcagctactcctgctgtggccttttatggattatcctggacttctacaactgacccctctactttctctccatctacaagcttcattttgctttgctttcctcctaatccagtttagattccacagtatattttttcaattacatcctggctaatatcgaaactcccttatccctaaatgtgtgagccacagtcatctgacgaaaccccaaacctggatcaactgttttccccatgcttacatgcaacactgttggagaaaatgagaaagtcaggcagattggttctgctaaaaaatgttgaacctcatcctcaagtgggccctcaacactgtttgccaacctcattacatctcttaggtcaactccctctcacagtctctattacgattaattcaaatgttcccacttacccttaattcatgttttcattcagtgactattcattgcacaccaggcactgcacgctatgccaggcactgcagactatgccaggtctgttgattcctacttcacagaggaaataaaacccctccaagcagaattccctcaatttactctttctagtctttccaactgaccttctgtgctttgcagtaggaatgttctcttaactgtcaagtcaaaattcctccctcaaaaataagattcccttgttaatagacaattcctttattttcttagaaaagtagtagatgactataattttaaatgtgtatttgaacaaatccttagctacataaagataagcaaagatatgacaggcaatttaattttatatgaagaaaaacttattatatcagacttacctatcattctaaatcagtacttttgtatctataatcagacaacatttaatgaactgaaaattctgcctgtgagaaactagtcataataaaattagacttggtttgctctttcatggagaacatattccagatgtttaagtgattcaaagaaaacccacaatataatggctttcttcaatgttttctcacttactgcttccaaactagaaaaaaaacctaatgcaatcctgatatcacttaaatagcacctcgtattgctcagcgttaactgtgctttttgacattttaggtgtagtgtttaataatttaaacacaaatttatgtgtgtcatattaaaagctctaatctgtgaaatatagccaaaccaatgtcacatctatttaaatagcaaagtacctgtgttcaccctttacagggtgaaggtcttgtgactctgtgtttaggcggccatacttcttgttatgtatgctgctgggcactgagagcccacagtggtgagccatccttgggtggtaaaagctgctaccaaaacctaaatcaaatgccaaagtgaagactgacatgagcattctcctgcctccttttcctttttatctttcctaccatctgttatctcctttcttccaccttcatgcgttgagtgccctcatgatgatttctagctgactgaagtcctttagtctgctcaaccccatctagagacttccccaaagtgaacctttgcccccagttatctgtttatcaactgacctcacaccagtcaaagcttccattgtcaaatattttaacagaaatttaggaattcagattaaactgaatatttggcattttttcttttttttttttttttttttttggagacagagtcttgctgggtcacccaggctggagtgagtgcagtggtgccatcttggctcactgcaacctccacctcccaggttcaagcgcttctcatgcctcagccccctgagtagctggtactacaggcatgtgccaccacgcccgaataatttttgtatctttagtagagacagggtttcaccatgttggccagtctggtctcgaactgctgacctcaagtgatccacccatccacccacctcagcctcccaaagtgctgggattacagtcttgagccaccccacctggtctgggttgttttcttcatctttagcagttgtcttgttcacaactacttcaacaatatttattttctttttctttttgaagcaactctccagagtatttggcctggtttttatagaaataataacttttttcttttctttttaaactaatatttttatgatttaggaaatctttctttattaaattacataatcacaacagttactggcaaagataggtttgagaacatacacacaactgacggttgtaacaagtcaactgatgggagcagaaggtccacacatactgacaggcacctcgaacattttattgaggctgtgagaggttcccatcactgctgtttcacaaagagaatgaagactttggctaatttggtgagtcttaagtggagattagttcagagaacttccactatcattgcttgaaagaagcaaaaaaaaaaaaaaaaaaaaaaaaaatcccaagatcttatggtaaagtttaaagaagaaaagtaaattttaaaaagaaaaaaaaagaggaaaagggagagcattgcaattaattatgagtaccaaaacttatttttgaatccccttcatcctccaaaacattgaagcaggattaatatgtgtgctcaggaatttgggagagaaaatgaaaatcaaaatattctaataagagacatttgaaaatgtacattgtgtcacctaaagggaactgaaatctagctatggcttaacgaggtaggataatcaacttaatggcttgagagtcttgcttgtaaagagagatgattagcacaaaggactcacctgtatcactgaaagatgctgcctgctggcttgccctctctgcagaggttcctgtttacagtttcccctcacatgatatttatttgtggctactagaaatgcacgttattatccagaagagaatgatttcattttgtaaccgttgtccttgtccaagtttcccccattgacatttaagaaatctgttttctaacctttctattatgcaaaacaaaattaatatggatcatttccttttagagataagtattcatatatatggatttaaaccacctttctccatgggcccttattctgatacttttaatccatgtatttattcataaggaaatggaacaatatttactatccacccctataaaactttctgaatttcacactgattccagtgacattccactaacacgaagttgaatacagatgaatacatcacatatgattttttttttgcatgtgtatggtcagaaggggctctcttttgtttgtttttattaatatataattcacatactttaaaattcactctttcaaagtgtacaattcagtggtgtttagtatattcacaagattgtgccaccatcaccattgtttaataccagaacattttcgttatcgtccaaaagaaaccccctgattgcttaacgtaatgtttttaatgaccactttttaaaactttaagttcaacagagtgattatcacaatgttttgtattatctaagaactacacaacagtgttatgctctatacagcaccacggtttactgatgaagtattcaggttgatttgagaggataatgtcgttcttattttgaatgttcatactggctccttttatttggagtgggaggaaatgcaaggcttataaatgaggtcagtgtaaccaatggttttatcaacatagtgaaccagacagagaaataacacctgcccagatcaagcaagtcaaaacaacacgtatagtcaagtggtgctgtccttgtacacagacattacattacacaaactgttctcctaagtgagggaatttgtcccttagaaattgcttattggaacatttggacatcatgcatcatgttaaagatccataaatgccatctcgatagggtagatatgaggcgtggtaatatcctccccatatctgcatagggttcttctgctcaacggattgctatgatgtattgcatcagagactcctgctctagtgcttcaaagacagctgagaagccccacgggagccttctgaagtcattgctacaagggctaaaataccaggagatcaggaagtcattctgaggacttgacaaaataccctactccctaaatgaaactgttatgatgtggttggtgcaaagtatgcatgcaatattttatgactgaatatatctttctattgtaaaaaataaggatccatttctggttgtgacatgagtagaatttagaatccagcagcaatatatttttcttgttactttgccaatccagaatttcttaggggaagcatataacataatagttaagaatatatattctagaggcaggcaaacctgcatataggtatcccaggttcctcaatttttacccatgagagcttggcaaggtttgtttgttttgaaaacaaacctctgcaagtttgttttctcatgtataaaattagaattctccaactactggcctcataggattgttgggtagaaataaaatcagtttatgtatgaatagagctcatcatggcattaggcacctaggaagtgctcaacaaatagtagttatcattattcccccattaacaaatatccattgttataatactaccacaagagactgtcttagtctgttccagctgctataatagaaatgccataaattggatagcttgtgaaacaacaaaaacttatttctcactgttctggaggttgagaagtccaagatcaaaataccagcagatttggtgtctggggaaggcccattcctcatacaaagcaccttctcactgcaccctcacatgctgaaaggagctagctagctctctgaggtctcttttataagggcgctaatcccaaaaatcacctccctaaaggccccatctcctaataccattgccttaggtgttttgatttcgtttcctttttattttttaggatttcaacataggaatttgaggggggacacaaacattcaaaccgtagcatagagcaaacattactggcactgcaccctaaagagaataagcccaggtatcagttcttcttgttttaaatattctcatcttccaatttgcttttgactattgcacacaggcacttcgaggagaaattgcgcctctgaaagagaacgtgagccacgtcaatgaccttgctcgccagcttaccactttgggcattcagctctcaccgtataacctcagcactctggaagacctgaacaccagatggaagcttctgcaggtaagcacattgtaaacattgttgtcctttgttacagtaaaataatatacagataaaatttgtaaagaacaatgaaagtacttttttcatgtaatgttcatggtaatatttgtgaggataggatattttatattagtttataattcccatctaaacattttcaaattattaatattaattttggaagcaactaagacttagtatatgtcttagtctgtttagtgttgctataaaagaatacttggggctgggtaattcataaagaacaggtgtttatttggctcagttctgcaggctgtacaagaagcatctgcttctggcgagggcgtcaggctgcttccactcatggcagaaggcaaaggggagctggtgtacaaagatcacacggcaagagaggaggagaaaaagagggaggggaggtgccagttctcatgaaaactgctagagcaaaacctcgctcactaccgtgagaatggcaccaaaccattcatgagggattcactcctacaacccagacaccttccactaggcctcaccaccaacacgggggatcagatttcaacacgcgagttagagggaacatccaaactctgtgtagcagtattcttacgataaacagaaaataatgctgaatcatgatggaagatgtgaattgccaccatgcagttcctttgtactcttactgcttggattctcaaaaacatctttccctttagaatcctaatttaaacaagagtcaatagtaagatgtgtccaaaagtcatttaaagaaagagcatcctatcacaaacttacatgtggaagtttttcgtaggtttgcgtaataaatacaggcaatgtaagtgtgctgctcaaggtcacacttactagccatgggacctggagcaaattacttaacctttctgagcctcagtctttcatcaaaaaaaaaaaaatgcgataataaaattctctgcaatatcagtttattattaggatgaataagtcaaaataaatggaaagtgctcgggagcgaacatgccaaatgataaacactctacaaattctagctcttgatgttgttattattattattattacagtacacaggttttggaatccaacatattagctgagtgaccttgaggccacttaatctctgtggttgtccatttactcatctctaacatggttactgtaacatcgaatgagttaattcatgcagagtaatggttgtagtggtggaagaggtgcgtctaccttctcagtgtgaaggacaccatgttataccccaaaaccctaaaattagtttaaccgtagaattagagaatcattttctctcctttccaattttctcctttccaacaggatgcagaaggtatgcctctgaggaaactgggtttaaaactatttggttttaactttttaataagaaaaatataataaaccaaatcactttcctattgtcagtccatttaggggtgtgattgagaggcctgttaaagaattgctagatctttaataaagataagttgcaaatcccagacctcttgagatctcacataatttaattcttgttgtgatggatagtcctgaaagatttgtattctagattgttataagtggcatcgactaaagcaaggcgatatagctaagtgattatatgcctttctctgtttgctccatagtagttgagtactattaaaattttatctgttccatccttagtatgtttttcatcttaagtataaataaggaaagtaataaatgtccaaagaaaaccaatggccacattagtcccatataagtgttctagaagtatattttataatttcttttagagagcagaatgccacgtttgctttcagaacgtggtaaaagatttgtgacagtggcaggtagatttccaaatgaggtcaaaggattatgactagtaagaaaagtttttttttttttaatcaatgctaagtgatccattctagttgcactatttatttgcatttaaggtatcaaaaacagtaaatagcttactatgtagccattctttacaatgagtaaaaacttggttataagtacaggaaaacacatgtaaggagatagtatgatatagcgaaaagagcattggattgactattaggaggtctaacttcaaacttaagctcagccattatttgaccgtgttattgtgagaaagccatttaacctctctcagctttaattctcctcatttttaaaatgcagaaatctattttgtctaaggtcacatacagttcaatcttatgattctgtctctagatatctgggggagatacacatttgacagaatttagtttaaaaccaatgaagttcctttctttattcataatacaaatgtggtttgttgaaattatatttctccttgtataactctaacttttaatctcttcttccctaaacccacatatacacagccttctcctattaaacagttcagtttgtggtgtctgctctatattgtagcaaatttcatgtttctatttttgaacatgaccttaaagatatgcttaaaaagtgtttttagcagaaagctgataaatccaaggttttggtttgcatataaccgagtcaagttagttccattcttttctttgatagtaattctgctacattataaatgtgaggccttgttcagaaagagaagaaagcaagaaatgaggttcacatcaagcaatttttttcccattactggaaaagcaattcatacatcctgttgagaatattttatatttagaacaatgtatgtgaggctaacgcattatccaagttctatggcgggaagcttgagcccaccaccattatgacatcatatttttttaaatagtaaatgtcaaaaaagacatatttctatgaaaataaagaatttagtcacaatgctatgtcaatctttaaatcgtgataaaaaccaagtacaagttcatctttgcctctgtccactaagacaaagaacaatcaaaaagtaaagaactctctgggcatggtggctcacgcctgtaatcccagcactttgggaggccgaggcaggcggatcacttgaggtcaggagtttgacaccagcctgaccagcatggtgaaacctcatctctactaaaaatacaaaacttacctgggtgtggtggtgcgtgcctgtaatcctagctactctggaggctgaggcaggagaattgcttgaaaccaggaggcagaggttgcagtgagctgagatcgtgccactgcactccagcctgggcgacagagccagactcggtctcaaaaataaaataaaataaaataaaaatagagaactggagtagtagaaaggcagatgtaaacctgagaaaagaagaagagtcttaaatttgggcaaaatagtataatagaaagattagagttacatactatcaggccgtgtctacttgatatcagaatatcctgggttctttgcattatccattcatttaattttcaaggaaagccatgctagttttttagctgtctgtaatatcagtcaaaatggtgaaaccagttaagggatgtgagcaccaacaatacagtcaaacccagtcacaatttacctatgtatagaatcataatgtatagagaattccaaactgactttgaatcttctaatagaaatgtaagagacattggtttgcctgtttgaaattttctgtgggaatgaagtcctattttcttcctcaaagtagacacattggtatgcatgttactatttgaccatttgactttttgtggtgtaggaaaccatcactccttgcagttagaaaaagtcctcatgtgcattctctcatctaagaatcacaaccttgtgattttgtattatgattatgattacctattatcattattcccttttacgtgtaaggaaaccgaggcttagaaacatgaagtaccacagtcacagtcacataacttgtatcagtcaagatctgagtcaggtttttcgaactgctattcccatgctctttttgtctcctcttctcaaaatcctattacgtttggacttaacaaagcaataatggctgggtgtggtggctcacgcctgtaatcccagtactttgggagggtgaggcgggtggatcacttgagatcaggagttcaagaccggcctggccaacacatagtgaaaccccatcactactaaaaatacaaaaattagctgggtgtggtggcgcacgcttgtagatcagctacttgggaagctgaggcaggagaatcgcttgaacccgggaggcggatgttgcagtaagctgagatcatgccactgcactccagcctgggcaacagagcaagacaccatttccaaaaaaaaaaaaaaaaagcaatactttaaaactattttggacaatacaggtgtaaaatacttcacttttttacatgtatcttcttttttgaaatgattcttaggtatattaacttttaaatcttccttttataaaccaatggattaatgaacccagttcagtgtaccccttagaaatcacacttgtttcaaatataaaattttaaagcattatattcctcattgcctttagaactcagcaattgtactaaaatcagccaaaagtgatttcagtgaatcagctcttaaagccaaactaatgctaatatttgaccaagtagaaacgaatatctaaaccaggtgagaaaaaagttaaaatgatgataaacctttctaattttgaaatagtacacacactgagtaatgcagtcaatctctttattcaccaagcgcaagtagtatataaaggaatattataccatttttctttactcatgagtaaacccacaaatagcacaaaagctgcaaaaacactttaacataaggagtatttgttttattgactgtaggaactcatggaatgcaaacacctttaaaatctgaataatatgaaggcatttccagctattagattctttacatatgtcaaagaacagtatcataaattatgtatgttttttaaaggtttcctaagcttcttccaaagtcatgtagacatcattacactccatctgtatacctctgtggtaacttgctgtcgcagggatctagagcctcatcttttgcaaacttcattccttctttcatccctttgttctttcattcagtcagcactgattgagcatctactgtgtacctagaagacattgtaatgatcctgtttggtccaaggacatactaaacaaaactccctttactgcttatgctatattaagtaaagctttaaagatgggttctcttttattacttccatgatggcccacccctctcatcctttctcagtgttaaaaaccagaaatatacatacttacatactatcataacactgatactacaaaagcagtacccattattatctctggtttacaaattattcaataatttcttactggaaacttggtctatatagtcatagtagtaagctttgtgagaggatgtgatgggatcatagttagctaaacaataggagtatttgtgtggcttcattttaaaaaaactaaccagtttttttccaacaagcaattcttatatcagaaccatttatattctttactttggtgagataggattttctaagcaggtcttttatctgtatctatgtatgtttgttcttaccatcattgagcacaggatttgatcctttaaatgtgttgacagattttgaacattttcctcatatctttcttttttgttttttaatgatcctgtactaatcattttgcattatggggtcacttctggacagagagcctagccatctgctcttacaaataatgtcggcctatcactaactggggataaggagaagacatctaccgatgtctttctagcatgtccttcttgactttttctttctttaagaagactaaaatgattcagcttgtggttctaccacagaactcaggagaaaatgataaatatgaggccattctccaaataaatatgttttcctacattagtggttctcaaattttaacaagcatcaaattcacctggaaggcttattaaaacacagataactgggctccacataccaagtttcaaatgattcagtgggtctggtgtggagcttgagaatctgcatctctaacaaactttcaagtgaggctaatgctgctgaatcatggaccacactttgataacccctgttctatgttaagtacttgtcaggtacagacaaatttaaaagttaaaaaaatatatatatgacttctgtaagacactgtgaagggtttagactctggggaaattaagtataatgccatcccaaaaactctgtgttggaggagtgttcaagtgctgcaggatcatggagaaccaagcacttaacttttctatgaggcagaaagaggaagataaagggaaacgtggaggatgaagggaaactgttaatagatccccagaaacacaatttgctgctatatggatttatatttactgtatttcaaatcacatggtctagaactgtgctgtccaatatgatagctacatatggccattgagcccttcaatgtagccagtcgaaagtgagatgtgtagtaagcgtaatatatacacatgtaatatgtatatgttatatatatgatatagatgtaatatgtatgttatatatatgatatatatgtaatatgtatatgttatatatatatatatatatcaggatgcaaagacttagtaccaaaaaaagaatgtaaaatatctcattatttttatattgattacatgttgaaatgatagtatttttatgtatttgcttgggtaaaatgtcataatgaatttcactcatttattatgattattcaaacttggttatttttcttgaaaatgaatgaagtgagcctgttgcttcggctacaacaatgggcagtgtttctgcaaaatttttacatgtgcctactagaacatttaaaattgtacatgtagcactcattatatttctgttggatagcattggcctaaaagttttcaaaatctagcatggataagaatcacctgcaaagcttgttaaaccaatccgcccccagaaatttagtatcgggtgaggcctgcaattctgcatttctatcatgctcccaggagatgctgtctatttgtaaccacatatagaaattcattcccaaactacagatgatagagttttacagagaggtgcaaaaatatatttttgcatcaagcattgtctgtagcttgaatacaaaattatgttgcccatataccactggtttttgtaagtaaagcagttgtgttacaaagcatacaagtttttatcagctaatagccttttctcaattagcagatactaagtagtacttttattatgtggcaattctccagtttttggaatgttattgagaaatacacagggttaaaacaaattagaaagcacctctcccaaaatactgcagtaagatgtaggaaaaactgctctaacatattctaaactataggttgctcttatgtaaatatttcaactataatatctagtctgatgtgcccactggccagagttttgtaaaagctaaaagtaaaggaaataaaaaaaagaaagaagtatgtgtttgtttttgaaaaggttaggtcacagaaggatttgttgatattaggaatagaatgacccgtgaaaaaaggacaattaagttccaggaaaacatcttttcagtaaggagagaataatcatttatgcttaacctcaactctgttaggaaaaaaaggatgtaaacaaaaccctttaaagaattgaagaaggagagtataaatttaaatgcccaggttagtgaccacccttagagcatactgaggtcaaagcgtactgtcaagcttaagaacatttggttttcaatgtttgtacaactaattgtactttagtcaagaggactgttatcgaaattgctcaggtagccttgaaactaatatggcccaaatattccagagtctgtctttctcaccctaggagaagaatggtctggttttcaagggaattctctattttttttttttgaaggcatcaggatgtgtgaaactacagggggataaatgaacgatgtacagaatgtgatgaaaaaattatatgaagtataaaatgggaatgaagccatcaggagccaaagaaatatttatgaatttaagagaatgaaaagcatattattattttcagatattttataaagtgaacccaaatcattataaagtattaattaggctacttgattgcttgatctttatatactaatttctaatttgttttaatcgggaactatttttgctagttctaaggctagctattatggtaatccatgtaagtgtgtttattattgtttttaaaaatggaatgtgttcctagtaaatgtgtttaaatagcaaaatgtatttatgcatgcatgtatttattttagtttcctgagacctctagttccttactagaaacatgtatataattccaggcatttaaaattgccatgatggtcatgttttcttgtccttttcccttattctgcaactgacatttgcccttgtctccaatttctcactgctttattctttgttcttgtaagtgttcttgtctctctgggctgacctctctccttccctggagtttgaccccgccccaccctttcttctgcatttgtttgcactggttgttttcttcattgcctttcccactgccccgctgcgctgcatgtgaaacactccgccagtagctgctcacagttcccatgctacatcatacccagcattcaaagagctgctgttctcacatggccgccagtaagattcccgactcctccttcacagcacattcctctagaaagtagaaagaatcccctttcaggccacatgagaagctgcgtgttaaagccaactccataaaggggaatggaaactagcgtatgaaattcagaaatgctacttttaaaggtaaataccacaaagtgaatttcaaattcatacagtttatcataatacttctttatttttataaatgctataatgtccttaatataatgatcactgtgatataagttgtcctctcccttaatatattaattaatttactaaaggagacgggagggtggaaatataataaattagaagatgattcttatatcagaagtacagcctttatacatagttttactttattcagacaatcaatgtagtcatatggtataaatttgaaaataattttagtgagcattacgcttactgagattaatagtgagaacttacctagcacttactgtatgccattcacaattataagcacttttgcatgtgctaatgcttttaagcctcacgtaacccagtgagggaggtacaattttaacctcattttacaggttagaaaaatgaggagcccaagggttaagtgacttgcctgtggtcatatatcaggtaagtgagagagccaggatttgaacccagacagtctgcctggggaatctgtcagaactcctaactatgcagtaccactcctctgataaaaagttgaattgacatgacaacatttcctattcatttatgattcgaccctttaaacaaaaagaacagcatcattctcacatttattaatttgtcaggaatcacctggatcatgagttgaggaaatttaaagtaggagggttgtatgaatttcagaccacgatctcaagaattgcctgtttaactcagagcctgaatcattcacagactaaaaactagaatcactcttctgtaggaccaagagggttgaatcatcaaagtcttgctgaagtgaacggaaatcctcctttgttcaatcattcattcaataattatttttttctggtgtctactctttaccaaactctgtttgagatgatagggattcagtcatagacagaccttctctgccctcatggaggttatggtttcttgggatgacagacagtaattttttaaatctcataaaataattacaaatgtgtcaggaaagaaaatacaggacactaccagaatatatagtaaggacctaaatgtgtgtgtgtgtgtgtgtgtgtgtgtgtgtgtgtgtgtgtgtgtgtgtgtgtgtgcgcgcgcgctgcagtaagggtgagaggcaggaaagggcaatcaggacaccctcccaataaaagtgacctttgaccgagatctgaaggatgaagacaagctgagtgactcttctattcatctatatcttttgttttaaatggcctgaagcctgggactaactaaacagggttgtaaaattccagtatgtaaattgaataactagggatcatttgaagtaatggactgcagagttaatgtataattaagtcacatctagggaagatttcccatcattatcacagagagcatcctgtttgctttcttcacagcacttacgaaaatctatagctatgtgtttggtggcttgtttaatgaaagtctgtttcccctatctgaatgtgagctccataaggacagaggccctgaataccacatctactgacatttggcagtgtctttcatatagtaagcattctataaatgtcttgaatagatgaatgcataaaactaagttaaaatgttactgaaaactataaaaataagcagaaagttataccagaggagaaaaattaggggaaaaaaactataatttctgaagacgtagtacttacatctaaatttgtggcttcataaggttaaccaacacttaaatagttttgccaaaactccaagaaaaaaatgaccgggtgtcgtggctcacgcctgtgatcccagcactttgggaggtcgaggtgggtggatcacctgaggttaggagttcgagaccagcctggccaacatggtgaaaccctatctctactaaaaatacaaaaaaattagccgggcatggtggcagacacctgtaatcccagttactcggaaggctgaggcaggagaaccacttgaacataggaggcggaggttgcagtgagccgagatcatgccactgcactccagcctgggcaacagagcaagactctgtctcaaaaaaaaaaaaaagaaagaaagaaaaaaaagaactaccatttgacccagcacttccattacttggtatgtacccaaagaaatataaatttttctaccaaaaagacgtgcgctcatatgttcattgcagcactattcacaatagcaaagacataaagtcaacctaggtgcccatcaatggtggattggataaagaaaacgtggcatatatgcaccatggaatactacacagctatgaaaaagaaggaaatcatgtcctctgtagcaacatggttggaactggaggtcattatcctaagcgaattaaagcagaaacagaaaaccaaataatgcatgtgctcacttataagcaggagctaacctttgggtacacatggatgtaaagttgggaacaacaggcactagtgacaagggcaggagggtgtgggacaagggctgaaaaaactacctatcgagtactatactcactacctgggtgacaggttcaactgtactccaaacctcagtgtcacacaatatacccatgtaataaacctgcacatgtaccccttgagtctaaaataaaaattgaaatctaaaaatataaaatatcaaatcataaaaataaataagaaaacaattgaatctactgatatgtttcattgcttttaaaatatccactttgaattactgaatattttaatatttttagttttacacttcagcacagaaagtccagaaatccaacccttgagtttacaaagacaccacatgatagttcatagttcacacagctagttagttgtggaactagaacccaaaatttgctctctatgtctctcacataccttttccctttattctaataaaggcatttgtcagtctaaatgtacaatattcgaagacattttttaaaggaactacttatccaaatcccacctgtcttacaaggtccatgtgaagcaatgagataaggtctgtgaaactgcttccgaaactatcaaatgttataaaaatgttaagttttattattagaactgcagttcatctctatgaaacctttctaaactttctcacttttctgaacttgactacgcagcgtcttttctaatctatttgttctccctttataagaagaatttaatcctttccgccctgctgggttgtaagaaaaaggactctcttcttttctataatctattgatatttgattatattacacatctaatgggttcccaataaatacatagtgaatagaattgaaccaaatttctttctagacatgtgaaaaaaaatcctgatctttaaatagaaagggtactttcaaagattatatatagaacctcttggtattttgtatttgcaatgaaaatattttaatttgggccaggtgcggtggctcacacctgtggtcccagcactctgggaggccgaggtgagcagatcatgaggtcaggcgttcgagaccagcctgaccaacatggtaaaaccccgtctcaatcaaaaatacaaaaattagccaggcatggtgacgcatgcctgtaatcccaactactcaggaggctgaggcaggagaatcacttgaacccgggaggtggaggttgcagtgagctgagatcatgccactgcactccagcctgggtagagagggagactccatctaaaaaagaaagaaagagagagagagaaagaaaagaaaagaaagaaaatattttaatttgtcttatgttcaacagttgcatcatatctgcatccttttgttaaaattgaacaggcttctagtttcatataataatttctggccaggcgcagtggctcacgcctgtaatcccagcactttgggaggccgaggcgggtggatcacctgaggtccggagttcgagaccagcctgaccaacatggagaaaccccatctctactaaaaatacaaaattagctgggcgtggtggcacatgcctgtaatctcagctactcgggaggctgaggcaggagaatggcttgaacccaggaggcggaggttgctgtgagccaagatcacgccattgcactccagccggggcaacaagagcgaaactccgtctcaaaataataataatcataatcatcatcatcataataataatttctaccaacagctggcaggaaaaaaatatgagagcatagtcatgaacttcagattccactccccttacttttggcattccattcctctgaattatagcttatatttctttattatctcagtttgatttagtctttctaaatattcacctctgtttccatccataaatatcgactgaactaccttttaatatactatctttttgtaacagagaaaatcaagtgtaggtggattattgtaagtgacactgaggaaatataaaaagaccttgacttgtccaggcgcggtggctcacgcctgtaatcccaccactttgggaggccgaggcgggtgaattacgagatcaggagatcaagaccatcctgaccaaatggtgaaatcctgtctctactgaaatacaaaacattagccgggcatggtggcaggcgcctgtagtcccagctacttgggaggctgaggctggagaatggcatgaacctgggaggcggagcttgcagtgagctgagatcatgccactgcactccagactggtgacagagtgagactccctctcaaaaaaaaaaaaaaaaaaaaaaaaaaaagaccttaacttgcttcaaacaagtcaggacccccaattccaattcttaggtctggcattcccatcagacacttaaactgtaggggcagtaaagttgcccatgtggctacagcttttgtggctgtgctgtacttgggaattttaatgttaccctctttgaattaggtccttcattgatcatgcatctcaaagtatctcagtgccacataaaaattttctttcagagtcatattttcccattatgaatgctacctactgcttatctgttgagtgtacacttttaaaccttctgtgggtggtggcccctttgccactgggtgagttagatgctgatcctggtcattatcgctgcctttccagccttttctgctcttacaccaagcacaagaattctctgctgatagtcaggatctagggctgggaaaatgggatgagttgtcctgttagacaggcccaaaaggagtattgtttaatccccagggtgtggggaagaaagatactcttgttttcttttccccaaatgtgtccatatacacccttctcctttgctggcagccaccaggcttgttgaggatctaccctcctctgcatatcatgtgcatcaagggaagccccaacccaagggaatacataatgatagtcctgagctatttcatggtgctctcgcagtcttgattgccctcttcggaattggacatggtcatattacgcaattttaggtaataaaatacaaagggcattcagctaagggaccttctgagaaaggtttttctcgtctagagaactaaacaggcatccttctccgggcactatgcgtagttctttattctacctggaacattctttctccagaaatctttgtgactaactctgtcatttccttcaagtcttattcaaatctcaacttaaaaaaaaaaaaaaccttcttaaaatttgaccacactaattagacagcaactgccccatctccctcttcccagccatctgaatccatttcccacttacctttttatgatagctcttctaggaaggcactccctcctccctgtgaatcatgtctccaggcaattgttccttgtgtagaggaacacaccaaatctgggctgctcctgtacaacaaactgaaggaggtagaattgattctgcaagaagttcaaagctaaataagaaggagtcttgtagcttctgtcttggtcttctggaatgctcactctggggaaagtgatctgccctgtactaagtctactctaaggccactgtgctgtctacatgaagaagccacaaatctaagctagccacatggggaagctgcatggaaagacaaatacgtggctagcccccagctgttggccgaagatccgcagccatcccaagtgaggagccagatgtacaagtgaaaaaactgtaacagccattccaatggagccttcagatcaattcagctttggctactatctgactgcaaacacatgaaagaacccaagcaagaaacacccacctgagcacagtcaactcacagaaccatgagcaatactgataaatggttatttttagccagtaagttctagggtgatatatagcaaaaggaacatctgtcctgttttttctggtttttcctatcatacactcattctgcaggattaacatgtgtaatatactttttttttttttttgagatggagtctcaatctgtcgcccaggctggagtgcagtggcatgatctcagctcactgcaacctccgcctgctgggttcaagtaattctcctgcctcagcctcccgagtagctgggactacaggcatccaccaccacgcccagctagtttttttttatttttagtagagacggggtttcaccatgctggccaggctggtctcgaactcctgacctcgtgatctgcccgccttggcctcccaagtgctgggattacaggcatgagccaccactcccggcctaatatacttttttaaattgtctttcactatgagaaggtgagctccatgaggccagggatattgtctgttttgttagctaatgtatccaaattacctaagaatagatcttagcgtggtaaatatttgttgaatgaacgagtgaatagatcagaatttcagtagctacgttgtgagtatgtggacagttcaccaagaatggcagaatggaaggatgggaggaacctggaataatgtcattgtgcttctggattacccagtcctggagcagctttgcctctgtgggccttgactagtcaagacattttgtgttgggtttttatgttaattccatttgcatcactataaaggaatacctgaggctgggtaatttataaggaaaagagatttcattggctcatggttctgcaggctgtacaggaagtgtggtgacagcctctgcttctggtgagggcttcagcaagcttacaatcatggtggaaggtgaaaggagaaccagcgtgtcacatggtgagagatggagtgagggggtgggaggtgccacactcttttaaacagtcagatcccacatgaactcactctgagtgagaactcacttattactgcaagaatggcactgagccattcgtgagggatccagccccatgatccagtctcccccaccgggccccacatccaacactggggattacatttcagcatgagatttgaagggaacaaacatccaacccatatcagttttctacaacctgcagcagaaagcatctcatctggcacatggtcttgcaaataattctgacttagatgcatgggactcagatatgactgaaccagaagataaatctaagtagcagacaccacagtattctcaaaaccactctttctctttctcttgttgaccgaggcttttctactgagcaaagcacctggtttataatatgttctttcattacgccttctcctaagagacctccttagtgtccctgcaatggatgtctggggagccaccaatctcttagagatgactagacatgtagccccagaaatggttacaccttgagcttttctctcagtgcagatgagatacattgcccatcccaccaatttgccacatttatctaaatttctgtgttaagctgggacctctaccactcaagctgggatgcccctcaccaccaccacactgcaaaaactaaacatttttcattagcctcctacttgcaattaagtacataaaacctgcaaaacaagtaataaaattaaggcactatttggttaatgccttttctcagaaatcacttttgcatgaagttcagttcagtattttatcagtgactacattagtctcgagaccctctacccaataggagggacaaagatgtacatgacacaggctcccttcaaagatgattaatacatgaactacatacagtattacaagggctccactagagatgtgagccccccagaaatgatattaatgtgcagaagagttagcaataaattttgcacaaggggtgacatttgagcttagactcgagcaatgagtagggttccaagaggtaaagaaaaaaatggaatggttttctaggaagaaaaccaggtctgggaagatctgatataacctgaggtagtttataagtctggaatgactgagttatcgggtatatggtggggaaggcagcagaggtgaaataagtaatatctaagcaaatgaaaaacatgtaattaggggagatgaaatataattaaattatttaccttaattcctcttttgactctttacatttgtcattcataaggaaacaatttcactaagattgttttgacctttttaccttatttggccaagtaaacaagggacagaaagtttttaatgtaaaatattcattcaacctgaaagaacattgatgattccagaccatttaaagttaaatattttagagttctcaattatttctatttggatgagtagaaccttttttcagacttcaggaatatatgtttagtttttaacagactaattgttcctgctttcatgccagcctcatgggcatcagcaggttcaaggttagtaggtaggaatctgccccctaagaatgcagcctaagagttaaggaatgcatgattacccctgtaattacttgagaggggctctgaaattctggcagggttggtgaggccaccagataacactgatcaagaatgtacacgaggttaggaattcagactgtagctgaagtggggagttcgggtaaacaggctctgaatggaaaagatcaggaattcaaatagacagttaagtcaagaaaccaacatcttagaaatgtaaacctcactttaagtcaaaggctctccaagctaagacttcataatatatttgccaaggcaagagctagtatctgcttacctgagtggtcctggagctgcggccagttgaaacaggagattgcagatggaatgtcagttagaatactttcagaggccagtaacagatacctgactttaaagttcttaagtttgtctttcccaaggttttctggtcataagaatcaccaggggcacttgattaaattattaattcacaagccccttcactggagattctgatgcaatagacttgggaatatatttttttttaacacgaactccagtggaatcaggcaagaagtgaaaaccctatcgttaataatagacacattagaaataatagagacatttgataatctagcacagttcccaaactttagtatgcatcagaatcccctgggggcttgttaaactacaggctggcaggctgctcccagcgtttctgatgcagtaggtccagcgtggagtccgagattctacatttctagtaggttgccaagttatgctgctactcctgtggtcaggaactgcactttgagaaccactaatcaaaataaactgaagtccaaagaccatcagacctagagctggttaattcaacagattagctatatcaagacttgaggtcagcttctctgggattctcttgtctttttcctcatggtcccaagatggcttcccactgcgccaagcaacatatccgcagacaacaataaccaaggcaagaaggaataaggttcaaggataactgtattgtgtgcgtgtgtgtgtgtgtgtactcatgcctgtgtgtctgtgtttggaaaagcaaacgtttcccagaagctccccaacaaatttcttcttatgtgtcaactagaactggatctcactgaacctctttaagccaatcactggctatgagaaacaagcttactgtgattggcttagaccagattttaattttttcctcagagctgtgtcctttgttgcccaatatctgaacataattgagcttctttaccaaggaacaagaagtaaatagctgttagttaggcaaatagctgggtatgtccacaaatgggttctgaaacaagtgtgattataatgaggttcagaattgaaaatattagtacaaatgctagtaaataatgtatgatattggctttcttatcaccatttgcaacagaataacagtctcatgaagaatttggcacagccattgtagaaaaagtgccttttcagagctcacagtatgcatgtactcatcttgcttttattatacctgtatatggaattgcaagctgtcccttcaggtaatgaaatttagacaagttggaacctgtataacagcaaatcaatactgaaattataggcaaagcctgtacttgtgcagactaacacataggatagaaagactttgtgatcaaaattcaacaaatcccacatttataggtatccaacatagagagaaaactatatatagtggtgtgtctttttatgtgtttgcgtttttctccttattcattcctgaaagtgtattttcttttaacagactcacaactcagctacaccccatatgcccacagtcaacacagtggaaaactgagttgtttatttgagcctcaagtcatccaaatacttcgttaaacgttgtagtaaaaggtctcccctgaattcaaggaggatgccctaagttttctgcatccttttgatagaggaaagtattaactaatgtcagactatctgttgttttattttcctttacagcactagattttgttaaggacattgataattttgaaagagaagctaagctaaggtgacaaatatatcttctgttggtcaatatctaaaattatgtattatttcttttttgactacaccttacagtggttagtttgcactttacgtaaaaaactgatgtctaccatcttccatctttgtaagcaccatccagcctaatagttgttggtttgaataatgccacaagctttgtccagaaaccaaaaacctgatttccaaagactagtctatgtagctgagcccttcattccataatcattaaactatggttaggacacagtatccagtctcccctcaaccttgtccaatcacagtctatgcagagatcatgtaactcgattaaaatctagaaccatagagacatttcccttccctggggcaaatgggaattgcacatgggggaaaatggtgtggataagcaaaaaacggaagtttccaaagtgcaacagaatattgataattttagtacatttcaacatacagtgagtgtaatgacggcattttcctactgcttccttagttgtgaagattttgttttttcttctgggttcactgccgggaaaagagcagaaaatgttttagagcctctgccagcagagggggcatttaccatttgtgcataaggtctctggcactgtgccctggggttctcttttctatatgtttctaacagtcacacacagcagtgtgactgtttacagatactttaccgtcttctctgattgaagcagggactggtttgccagcaacttttggttgtttttgtttttttgaagaccatgcaactaacagatgtttgttgttggctccatatctacattctttgaaagctggagaatcaaattgctgacattcagacaacactaattcccatatccagggagcctaatttgccgtccctgagatcctgattcctggtgttcacgggtttaaaaaccatttcagtgacacaatataagaatgggcttgggagatgcagcgctgtctccactaaagataatcacattttataaacatctgcgtcattactggtatgattcatctctaagctgtatacagctgtgtttccagtttcaattaacaatcccttaattgcatatccatctcatgttactaatttagttaatttattcataattaagagtattctgttttctaccaaggtttgtcgagctcagaacattataaagaaaaatattttaaggcagcatctccgagggattttgtttcttataatcacatcacagtaaaatgtcattcatgcgcccaaaggaagatgaattgctaagggatttttttttccagtaaaataagaagctttgggaagctgcagtgtgttgtgtttttaaaccaagttaaatgcgatgcattttgttcttttctttctccttccctgacatcctctcaaaaaaattatcattttatttgtattattgcttaagtatcacagcaaatccagtcaccagtgcaaataaaactgtcattaccctgtcaggtaatggtgtctcttaaaatctaagctataaagtctgtacattttagaggacattaagatcaagaatttttaaattgcctaagtctaagcaagtggagtacacccttgtggaaaatggaaggcagatgaaaacatgatgccaggcagtgaattcattttagtttgatcttttctacaaaaatacatatatccgtgcagcaagagtcttgcctgtgttagtacatgtgtctgtgtgtcattcaaagcagcaataacaaaaaattaagaccatttctcactttgtttattgttcaagaactcccacctatagccttgacctgtgtttgagcttaaaaaaaaaaaaagtcttataactgcccagtggtttggagattttacacaatagaaataataagccatcttttgcctcacatgaattctactaaaatcaaaactccataggatactttccaaagtaactggtgaaaggaaaagtgtggtagtataggtatgcatattatccccatcactttatttctgagctcttctattttttaaaaattttaatttgtatcttaaaagggcaaaacataagaagaggtaggagtattctaaatttcagtgacaacaaattcatttattttacaatttaaccattgcccgtcaacatttacttaaaatttcagcatgggaggttttaaacacttctagagtcccatcttaccccatttccacgatgcttttcttctccatgtgttgctgcagtttaatattgtctgcgtgttttaatatgttaaacgagttaaacatagagtaggaagttaaaactgttagcagctatatgtttcccaagattgatgaaaattcaggtaacactccaacctgttaaagatacctgcaatctggccaggtgcggtggcccatgcctataatcccagcactttgagaggccaaggcaggcagatcacctgaggccaggagttcgagaccagcttggccaacatggtgaaaccccgtctctactaaaaatacaaaaaacatttagccgggtgtggtggcatgcacccatagtcccagctactcgggaggctgaggtgggagaattgcttgaacccggagcctgggtgacagagtaagactctgtctcaaaaagaaaaagaaaaaaaaaaatatatatatatatatgtgtgtgtgtttatatatatatatatgtgtgtgtatatatacatatatatatgtgtatatatatatgtgtatatatatatatatatgtgtgtgtgtatatatatatatatatatgtgtgtgtgtgtgtatatatatatatagaaagagagagagagagagagagagagagtaagcagggaggggttgaagccagaaaagactagaaattatctaggccaaaccctttaatttatagattaggaaatagtttctggttgacttagctgagacgttctcatttgttaaaagcaagatcagaaatcagacacaattcaacgctcttcactacaccttgtttttctctttgtggaaaacaagacgtatcctgttcaaaaatttatgctgtttatctgaaagcccaaaatgcctgtttacatcatattttccattttgcaatagcagctcattttggggattattttctgatgaaatctctaggtttagttgtacttgaatatctttttatctgtacacactggaatatgcatataataattgatagaaatgtggattttaaaagtagagatgatcattattattttatgatcctttaagttaataaaattcacctagaataaaataaacaagtttaactaaagttctcgcattttcccagaaatcgtagactagaaactagtcttatttgcttattttattccaaagcttattttacctctattattttgtggttctataaaatatttctgtgtattcctccaaagaacctcttggaaaagaaagtaaacatcacatctgaaaaatagctgggcattttttcattatctctgcaaggggaggggacgtgaaaggcaaccccatatagaaactcaactccctgctttttacaatgaatgaagtttttccactgcactgtcagaatggtaattcttgctaactactcacctatttcacaacattaacagagttccaggattcatgctttaatattgcataatggtccatgttttgaacatgaggagtggcagcggagattacactttgattccttggatttcatgtggcactggatgggagcaaggcactgattttaagttgagataaaaaggagaagtcagtcaatgcctgcagccagacaggactcttgtaatagctagggagtatgcctcatttggatatgcatgactgccgggcaaggacactgccatgaatcgctaatggcagcagttgtatgacataagagagatgtgtatcagcaactcacaagttgactttgttacatgttatgaacacattcctgtgggcactcattcatagaagtgagaaatgtggacaccacagtgtcccaggcctttgttaccttatggcctgggaatatcttgctttgctggaacatgaagccacgtctggttataagaagaagtttgatctgggagcaaaattgcctgttcacgcatgtctttctcacttctttaaaactaacttgctataagggtgattaaaaaaaacagatgtcaggtgagagttttgctttgcatcaacttcctacttgtagaggtaataacataaaccttgcctggcaatcattatttgtcatccagctgagggtgtttactcttgagaaagaagtaatggacaaaattgacttggattctggttctatgtttcccattaattgactctggacatatacatgcaatttaatccatcttactaaaaacatgaccaactcacaggatgtaaattctattctatagaaagggctttccctcagtagttagtcaagggacggttcctaactcctgtctttattgagcttattttccaaaataaatgtattattttctactttgttcacagagcaaggcagcataaagaaattaagcaacaaaacaatagtgtatttttacccaactttctagaaaacacccatttttcttaagttttgatatttttttgccaacaggcagtcaaaaagaagataaataaaactgggttaagttggtaatgacacaataaataaatgagatgaagaaagaggcaataaatatgagtggataccaacaagaaacatgttcaagccctgaaaaaataatgagaaaaggtagaactattaataatacatcccgctctcgtatcacaccttgctccccagatacatcctatctgtcctggcaccatgttgatgctgttgttctgtaagctatgccaatgaacatgttggatgacctactccagctctacctcaagatttccaaataagaaaaggacccagggatctccttgctgaggtctttatccatttactcaggtcacaagtactaattaagcagctcttatgtgcaaaatgttattgcttcaggtcagtttttcctatactgctgttctataagagaggaagaaggtccctgccctcagaaagccctagaatacagatctagagatgggttcaacatctttgttatgcaattatttcattccaattgtaatgagtacttagaaaggacaaaagcagagtgctgagagagtataacagagggacttgacctggtgtagtaggcctggaaagtttcctggggaagtggtattttagacaaacaacacacacatacacccatgaatgtatacgtgtggagaatgtattctaagtaactatgatgaatgtatttcttactgtaggtcatggtcaaagtttgaaaactattgttctaactagtattataattccagggatagtagaggtcatgtgacctgtttagcacatgcctgccttaacagtatctagtaggccaggcaatgtggctcacacctgtaatcccagcactttgggaggccaaggcaggtggatcacttgaggccaggagtctgagaccagcctggccaccacggtgaaaccgtgtctctgctaaaaatacaaaaattagccaggtgtggtggtggtgcctgtagtcccatctactggggaggctgaggcaggagaattgcttgaacccgggaggcggaagttgccgtgagctgagatcatgccactgcactccggcctgggccacagagtgagactctctggaaaaaaacaaaaaacaaaaaaaaagaatgtctagtaaataagtcagtgccaagcaactacctgataactgttaccaccttagtcatcaccgaaggcagaaggtcttgcattcattggaggagagttaccaatctaagacatttgcatgaaaatgtgcacagagccctcacctgataatcaaagcatgttccaacacttctctttggataaaataagagttacatctcaatgaaatcacttgtggatcaagttctcatcctttcgtaaataaagagaggggcagcaagaaatggaagtgagcacatataagtgtgggaacctgtactttcctaacctataaagcattggatgtagtttttgctattggtgcgcatggagtcatgtggccttggagcagttaggtaccttccctgatgataggggagaaggcaaagaaattgatgatacatctctctcattgtcattccctagtatattacacttaaatctaactgccctattttgtgattgccttactgctgtggcttgaatatttgtgtctccccaaaattcatatgtggaaacctaattccatatatgatggtattaggaggtaggccccttgggaggtgattagatcatgagggcagagcccacatgaatgagattagaacccttataaaagagacccagagagctgctttgccctttttgccatgagaacacaagaaggtgctatctatgaacaagaaagcaggccttcaccaaacactgaatctgccagcgccttgatatcagacttcctagccttcagaattgtgagaaaaaaactttggttgtctataagccacccagtttatgatattttgttatagcattccaacggactaaaacattcattttccagaaaatctactccatttataagccagcattcttttttttttttttttaattttctacagatctctgcagaaacatgcagagtaataatagggccaggcacggtggctcacgcctgtaatcccagcactttgggaggccacagtgggtggatcacctgaggtcaggagttcgagaccagcctggccaacatggtggaaccccgtctctactaaaaatacaaaaaattagccgggcatggtggtgggtacctataatcctagctactcaggaggctgaggcaggagaatcacttgaactcaggaggcagaggttgcagtgagccaagatcccaccattgcactctagcctggacaagaatagtgaaactgtctccaaaaaaaaaaaaaagaagtgataatatatttgctgtatatattagttatagatagttatattgcagtactatcagaagctatgccacatattatttacgtatttcttaagatatagaaaacatccctcccctgcagtcattagtacttttgcattcaaacttcaaatgaaacaggactttagaaattataggcttggtgccatcctggccaacatggtgaaactcgtctctactaaaaatacaaaaattagctgggcgtggtggtgcacacccgtagtcccagctactcgggaggctgaggcaggagaatcacttgaacctgggaggaggaggttgcagtgagccgagatcgcgccactgcactccagcctggcgacagagcgagactccgtctcaaaaaaaaaagaaaaaaaagaaaaaaagaaaagaaaaaagaaattataggcttggtgatttctcaggcattaactcaagaaagcagcctttataccgattacctacattcacccagcacttaccccattaatttctaatgttgcttggaacaaatgaacattcctggaatgcaagctaaatgaaagagccccgaagaagaacagggcatttcctggttcctcatattgacaaatttaaaagcctgtgctataatatgggctcctgtttcctttcaagtttgtctttgaataagtggacagagtagctgaaagcagagtatttaaagctttgaaacgaccactttatttcagtctctgttcttgctgggaccactcttataaatgaggagattagaaaatcacctagaactatttaatcgttgtgcagaagaccctcttaccccaaatatttacttaccgctcattttattggcacactgcctcaaattccacctgctgtgaactgacctaagtgaatttaggtcacgtgcaactattaggttctttttgggaaataatggagaaccacagatgtgtttgaggtggatgaggaatggctacctcaagccgcagcttcatgcttcatgctgaagtcctccacaagtgcaatcatgtcgttaaccaacatttgttagaaggcaggcagaagtcagcttacagcctgttctacaatttttatgaagtgtaggattttaggcttaaattgacaccattgcaaatacagtattctcttacctttagatttggcatcaggtcacaagaattcttcctaagccaatggttggatacaaggccattggagaccagacgtaaaattaaaagcccaagcaacaggttttgctggattcttatatcctgtttatgcaatgttaggggatgtcattaaaatattttagttaatccatgtatcttgattgtcttaaattttactaatgagatcctatagggatattcattgcaatccactatttccctcagcaaaaacacatttgcgatatctattacatgcattacaaaatcctccaaggttcacagagatatatagtagtagcagtctctgggttttggcctttttcataagatgaaggctgtgctgtcctagaatatgaattcctaattaaaataaccatttgcctcaagcctctagagttgaaggttgcactaactgcacatataaaatatccaactatctatgttgagatatttaaaattaattacagatattgtaacaccattatttaacttaaattccattacaggtcctttgagtatgcaaaatatttctttgagatgtggtaacccctttaactgatcaggaaataaacctttattatcaagttgttatcccaccttgacaggcctaaagcgcagaccacatatcagaatcccctgggcagcttataaagctcctcatgcccaggctgcatctcagaccaattcaatctctgggggtgggctccaagcatcagcatttgttgaaaatccccaggattacaaagtgcggtgaagtttgcaaacccttgtaataagagaatgggaggagggatggctgtttgccaagcagaaccaggaatgaggaaggatattggtaaacaaaatttatccataattgacttttcatgaatcacagtcctactgagacccagccttgtctcatgagactttggctacgatgatgagtgagaaaaggactcctcctaatttaccagactcttgattagaagcaaatgaaattttggaaaagagacaagtcactttcaaaagaccccagcctgtacctgaccctacctctggactccatagtaatggcaggtagtggtcattcctggagtaactctgtatttcttaaaggaacatttgcataatgaacctacagcaatctggaagacgactggggtaaatagagaatttgttgattttagatggctgaatactatccgtgcagagcaattaaaaggacaactgtcagaatcaagtaagagaaaggaaataagagaagtctcatgttagtagaccttgtttgatcaatgtgttttcatcttgtatatgattaataaaataagtttgggagttaggatcaacctttgtttactcactggagaataacttgcatatagaatgaagctgggattgtccaggctggtttttttccatttggaagtttggatacaatacaaggaagcctgaattccaaactgtttctcttaaagagtgcctttctgagccgctattaaggaatgcttattgtttcgaaaatggtagcacagaagtgttataactagagtacaccttgtgcctgcaattaattacccagtgtcttcaaaaattcttgtcttttgctggtagaaaacctttgaaactatagttgtctgtggtattcactgcagcaccttagatataaagagagaaatttattttcagaggaatcttgagacagtttgtgtgtgtgtgtgcatgcctgcttacacatctattggttttccccaaggattgtagaaatcccattaaaattccagcttcttaaggagctactgaaactccagtttttcatattttcttttataatatttggatgcgtttaggtaaacttgcagcattttaattatgtctgtatcagatgagcggaagaaatgtaaaagggtttggggagagatttaattttagatagcggcgtaattaatagcatttggaaaaactagtggaactttaattaaatgtctctacattaatttagtcatttaattgaacatgtagtgggatagtccttacaatttttcacccttactctttgaggaaaaatgatttttgaataacaaagcatcagtatgactactttttattatttagctgtatgttcactacttggcactttgtttaatttttccccccatatgtttcgagctttttaaaacattaatttggcttgtcgcttttatcttaaaaactataaatctgggggccgggtgcagtggctcatgcctgtaatcccagcactttgggaggccgaggtgggtagatcatttgatgtcaggagttcaagaccagcctgaccaacatgacgaaaccctgtctctactgaatacaaaaaaaactagccgggtgtggtggtgcatgcctgtaatcccagctacttgggaggctgaggcaggagaattgctggaacccagggggctaaggttgcagtgagcagatattgcaccactgcactccagcctgggcaacagagtgaaactccatctcaaaaaataataataaaataaagaaataaagaaaactataaatctgggagaaaccgtatttggaaacattgagcaactgtttcttttcctttattttagactttaatattcactagagtcatgttgtaaagttttcaccttaatattgtaggctttttttttttttttactttgccaacttaactggcttttttaaagtggtgttatgctgcagcagtgtatctgaatttcagcagtgccttttacgtggctgctcacaatcttattaaactacatgaattatacatggagagaaatataatttggtaaatttggtgatgtttcaataaccatgcccaaggaggaatgttgtgttaaactgtcaatttgagaagtgttttgtggtgctaaccacagagtgaattcagttctacttcatttcacaaccctccataaatagtgccccctaaaagtggtgcctccttgcctgtactttgacccagatttttgtcatttttctagataagcatatacattgtgcacttattaatttttcaaatgacacaaaggtgagaatgggagtcaacacactgaaagatcaaaatcaagactcaaaataagattataacagactgggatactgtaccaaaataaaaaaattaaaataaaatttaacaagaacaagcaagatgtcctgcctttaagatttttaaagtcttttgtacaaatataggctgaggaacatctgactttgtggcgctttatatgaaaaacaaattgggattttaaataaccacaaggactgtattaatctccagtatgatctggtgtggcttactgtacgaggcaatacagtattagattgcattaatgaaattcacaaatgttccattaatctcttcactagttaaaccacatctgcagtcatattgacttatgagcatcacgtatgatgagaacactgaaaaatcataatacattgacagcagggcaaccaagattgtgaaaggtatagcgatggttatatgacaaatatttgaaagaatctagaatgttcagtaagaagataacatgaaaatacaggacagcttcttcatgcatctggggagggtgggtaaaggacacagcacacttaattaagtaagattgtagaagagaactatgggcaagtgttacagtggagcttactctgagtaaggaaaatgtaaacgttagagttgttattaagtggcatgggctgcttcacaaatttccatcattttttaatctgattcatctgctaataggacaaactgtaacaatagcttaaacaatagagaaatgtaggtctctctcatgtacaagcccagaactaggtagatcaggcctccttccgctattctgcttcactaagtccgaagtcctcctttaccttgtcctgccatggtggcctcaattctcgttgtcaccacatggtccaatatgtctgcttcagctccagccaacacatctgagttccagcccccagcaacatggaagaaggaaggaggcacagagagggcgtgtgccagcagtgttgtgagaaaatctttcagaaactgtcatgaaatgtatcccctgatagttccttcaccagaactttgtcccatgattatatttacatctatgtgaggctaagaaatatattctttccttcaggcatctacatacccaactgaaaattatgagttctattgccacaagaaaaaatggaaaatatatggggacaatcaacagtacttgcacaaagatgttttacagagaattactcttttacctgggaattttacaagataaactttaagatcctatcaactctctctctctctttttttttttttttttttttgagacaagagtctcgctctgtcacccaggctggaatgtagtggtgcgatctcggctcactgtaacctccacctcccgggttcaagtgattcttctgcctcagcctcccgagtagctgggactgcaggcgcccgccaccatgcctggctaatttttgtatttttagtagagacggggtttcaccgtgttggccaggctggtctcgaactcctgacctcaggtgactcgcccgcctcgacctccctaagtgctgggattgggattacaggcatgagccaccacgcccagccagatcatctctggaggcagggggatcacttgaggtcaggagtttgaggccagtccggccaacatgacgaaaccctgtctctactaaaagtacaaaaattagctgggtgtggtggcaggcaactgtagtcccagctactcgggaggctgaggcaggagaatagcttgaacccaggaggccaaggttacagtgagccgagatcgtgccactgcactccagcctgggtgacagtgagactctaactcaaaaaacaaacaaaaagagtctatgatcctataatttatagacaacatacaacctcctttctctacaaagagaattggttctcaagggctgtttggaaattcatttccttttaagtccaaaatgacatacaaaagtgaccaatatatacaatgtacacccttctacaataagttctcttttgttgccgtagtaatcgcatgtcttttcttaaaggaacacttttttgactcttttgtacttttgaacatagcggtgttaataataatatttataaaacattatgaaaatatgcacacaaaacacaacacaggctaagaaaacctaatggtggcctaaagtaagttctgatgtcctctgttggtggtattcttcattgccatgcttctgctgtgcctgggacctttattgctacctatgggaagttgtaagtagagaagtttctttactacagggatgtgaacaatcattgtaagtaaggaataatgaattcacataagttcacagagcatgtttttctgccctggtaatactgcatttctcactttgcatttaaagtacctacgcccttacacagaaaaagttatcggggttgggtgcagtggctcacgcctgtaatcccaacactttgggaggccgaagcagggggatcacttgaggtcaggagttcgagaccagcctgggcaacatggtgacaccctgtctctactgaaaaaaaaaaaaaaaaaaaaaaacacacacacagaaaaattagccaggtatggcggtacatgcctgtagtcccagctacttgggaggctgatgtggaagaatcgcttgaacctgagaggtggaggttgcagtgagccgagatcgcaccacttcactccagcctgagtgacagagtgagattccatctcataaatatataaatatatatatataattatcgattgattaatattattatatggtccccattactctaaactctcaaaatgtaatgtaggtcaaaatcagaaaaaggccatactgtctactccttcctctgtttcattccaactataagagaaagggagagggcaaaacaaagatgacaggaggccaaattgtacatagaattcatggaaattcttacccaacatgtaaaattatgatagtataaggaaaagtatactgcaaaaattaaacttctacattgtgaaatggagaacatttttacatctagctctattgcttctccctgtggagctgttctaagcacaaagttcccattacataatgaacaactccttaaatactgtgcaactatttctcactagaagcacgatgcagcaaactctgtttctcagtaaccatttatatcatacctagtggtaccgagttctataataaaagggtgatatgtgcatattttgtggtcatagagtgcaaagttgacatctacagtttaaagcattgcattgcatgaataaggtcaaaatttaaatacttttctatgatcatgttctttacattaaaggttaaagatgcatgccgctttaaaaatggtttaagggccggacacggtgactcacgtctataatcctggcactttgggaggctgaggtgggcagatcacccgaggtcagacgttcaagaccagcctggccaacatggcaaaaccctgtctctactaaaaaatacaaaaattagtcaggcatggtggcgggcgcctgtaatcccagctactcgggaggctgaggcaggacaatctctggaacccggaaggcagaggttgcagtgagcagagatcgtgtcactgccctccagcctgggcgatagagcaagactctatctatctcaaaaaaataaatgaataaaataaaataaaaatggtttaagaacttcaaaccatctggcaccagaaaacacctaaattgaattaaaaatctggaaatttaatttcacaacttgtcctttttcaagcctaccctaagttttgtttacttaatggggagaatctgttttatttgttcctatgtagaagactgctgattttatcatgattgtattagggcccaaggatatttaaaatatttcagtagctattacttatactttatatctgcattgcactttagagttgactgagcattttcaaagtattatcttaccaaattgccacaatagtcttgagaggctagtaaatcatgggagaagcccccatttccccactggaaagcagagaaaacccccattgtagtaaaggaggggttccctccagagctcttgtggttgtgttgaggaggaagtattaatgctgctgggcatgacttacaagaaataagtcaattcacttaagcaaaagtgctatgatcctgtataccatgtgagcagctctaggatggggtcacccagcattttggagcagacattagaacatctggagggagtaaacgcaaagaaaatgggctagatacctttccttggatgggaaaggataacattaagataccaagatcaaatgttcaaagagcacatatacaccagagaatactatgcagccataaaaaatgatgaattcatgtcctttgtagggacatggatgaagctggaaaccatcattctcagcaaactatcacaaggaccaaaaaccaaacaccccatgttctcactcataggtgggaattgaacaatgagaacacatggacaaaggaaggggaacatcacacaccggggaatgttttggggttgggggagtggggagggatagcattaggagatatacgtaacgctaaatgatgagttaatgggtgcagcacaccagcatggcacatgtatacatatgtaacaaacctgcacgttgtgcacatgtaccctaaaactttaagtataataataataaaattttttgtaaaagcattgtataataaaagtagtaagataaaccagtaaaaacaaaacaaaacaaaacaaaacaaaaaaaagttcaaagaggccgggtgcagtggctcacgcctgtaatcccagcactttgggaggccgaggcaggcggatcacttgaagtcaggacttcgagaccagcctggccaacacggtgaaacctcgtttccactaaaaatacaaaaattagctggatatgatggtgcgtacctgtaatcccagctacactgaggcatgagaatcacttaaacctgggaggcagaggttgcagtgagctgagattgcaccactgcactctaatgtgggcaacaaagcaagactctgtctcaaattaaaaaaaaaaaaagtttaaagaaaaataagttatttctccatgcttcaggagatatgtttcgcaggagaaagaggcttaatagagaaaacagatccctacaaacatttgtggtttttaaaactgccccattggttactaagtggataacatgagcgtgatgccagattcagtactctagtgagccatgcagctttgctgtgctctgcacctgatgagtgtggcctcacttcttataaatgcctgtcattgctaacaggggtccttgctgaaacaacagggctggactaatgctctagttcccttcctggaaaacctatcccaaagctgagatcctcatgatgccttctctcatatatgaatgattgcaggttacgctatcatcattaaatcgaaacattttagaccactttgcgtttgtttgtttgtttgtctcattatgtccagttttatcctgtttcataatttaataaatttttattgggtctgtcttctggttaaatgttgtgtgtataaaaaataaagtcaagagagagaacaggagttatggaactaatgacaaatccatccttcagctaaataaaattatactatggatgatttgagctgtacgttgagtgataatttttaaaaataagatagatcgggtgcggtggctcatgcctaaaatcccagcactttgagaggccgaggcggatggatcacgaggtcaggagttcgagaccatcctggctaacatggtgaaaccccatctctacttaaaaaaaaaaaaatacaaaaaattagccaggcgtggtggtgggtgcctgtagtcccagctactcgggaggctgaggcaggagaatggcgtgaacccgggaggtgaagctcgcagtgagccaagattgcaccactgcactccagcctgggcaacagagccagactctgtctcaaaaaaaaaaagaaaaaaaaaaagggccaagcatgctggctcacacctgtaatcccagcactttgagaggccgaggtgggtggatcacctgaggtcaggaattcgagaccagcctggccaacatagtgaaaccctgtctctactaaaaatacaaaaaattagctggacgtggtgacaggcacctgtaatcacagctactacggaggctgaggcaggagaattgcttgaacccaggaggcagaggttgcagtgagccgagattgtgccattgcactccagcctgggcaacaagaacgaaactctgtctcaaataaaatgaaataaaataataataaaaaataagataaagtatcacaagtaagatgtagttgaaacttcatgcatttttctatgatgcctatgatattcaaaagataactgaatttcatgagcagagttcaagaacttctgagtatacttttcattgatgacttaatgtaatggatttctatgatgatggcactatattcttttggtgtttatggtattaataaaaaattgtggtaaagcttgtggaaatgaacatgccttggattagggtgccttaaatgtgcctttgtaaatgcagctaggagactccaagtcacccttctagtctaactgctactcctttcttttacaaactacatgccaactaaactgaccttgatctgtttatgaaaaggcggtataggaacaggggctctgcaattggacagatccaattctaatcaatccactccattgatagatatataaccttgagtccttcctgtgcctcagtttcctcatctgtaaaatggaattaaaaaccaacttcgtgaggcttttggagaatgaaaatgacataactcaaagattattgggtatcagaaacaataatgttatctatcactgtctttactgttattattattattgtcattattattattttctctacctggaacaccaattccacaaactcttaatgtcaagaccatgctgtatcatggagccttccctgattcctccatatgaaaataattaattctcatattaataatattacttttctagttgtattttctttttttagcttttattttaggtttgacggtacatgtgaaggtttgttacataggtaaacacatgtcatggaggtttgttgtacacattattttatcacccagatattaagcccagtactcaatagttatcttttctgcctactcgtattttcattatccccaagtatactatacatatcttaaaattaggatccatgttgaaaaaacattgatatttcctatggcttctaacacagtacattgcacttagatattcagcaactctgtattgaatgtatgggtacaatctgctcttagtttctaatttggtattaatatgttcaagcctcaagagctcatgtaaatgatggtttgactatattgcccatcttttgttaagttgaaaagctgaaattcatgcactgtttgttagtgtagtaatttgtgacaacgtctagctattaagtcttttctaggtataaaacctttatatctgtcattgttcccctcttgtgtttttgctttaatatcgttgaaagcatctattattggaactttcacttctgaatagtacttttgagaacctgtatagaatttcagaggccttagaaaattgtcatagattgcttttagtatatggtttaccactgtggtctcttaacttttcaaaaagtatttccaaagggcacttacatccataagtggaaattgatttacatctattattgctgattgttcactattctgaacttcggctaaacaggtgatttaggcagaatttttttaaatattagattttttcctactttctaaatattttgtagctctttcttattaatttgagtcaacttatgctcgcttttttttgtcaattatagatggttgtcaggggtttggcaaatgtcatatgaaggtaattctttaaaagttgggatttttgaactgtttatttctactacttttgattttgctggaaattatcattctattaaagggacaaaagggtgctcagaaatatgcattgaaaaatttcttacagatttatcaaccattgccctcaggcactgatattcagccagtatgttccaatacatccatgtctttccattttaaaccttttaattctgttctaatttttcattgcctgtgcctgattgttctgtatccatctgatacgaatggttaagtacaacattttaaatatcactcttgcctatacatattatttttcttgtcagatgatataattgtagtcattacatgtttcttaagcacaactgaaatcttaatttaaatcaataagtcttgtttctgtggccattgtttcccagaactctccggatttctaagcatggtggttattcttccaggaatagtgccgagagtcttcagcagcatgcatttctctctaattgacattatttcacactctccattttccttactattgaaaactgtatttcattggtattttgccaaggatcctgctctgtttcataataatgttctgttcgcactctctgcactgacaaatacctattccatgcatcaattgcataaatggcaatttgaaagcatttaaccacagctggatatttttcattgattcttttcatctgaagatcattcattaggcttctccctcctgtttcttctcacatccatacctcctttcctcctatgtacatagtgtcttttgcattttctgtatttaagtgtaaattgctgactacagttatgcttttacctcattccatggtcataatgaaatcacaaatttaaaaatgtactactttttaaacctgttttctgacttgtccatctaaatgcaattttataattcttcgacattcagcctcctggtgaatgatttctgcaatctctccaagacatctgtgcagtgttatggattatattgattgcattttgtccatgttcaaatttgcagaatgtaacctacagaatatatattgactaataaagaaatgcatccacatggtggatggttgtaaagagaaaatatatattggtgtgcagcaggcgcccacacaaatgaaatctagaaaacagcagcttgccatgtcagagttgcaaatgaaggctgtggctacaaaacacagaaagtctggagtgtatgaaaggtttttcttccaaattcattcacacataaaaatgaaaaaattgaaaaatcatatatgtgcaccttaatttttatatcgcattggtgtttgggcatacgaccctgagattttcataccctcgatttttttaatataaccacctgagcgtttcttcccatggggttactttagaagatggggggtgtacacactacgtatgtatgtcaataaagaaatgaaggaataaaggaggaaagaagtgaagaaggctgggggtaggaagggagggagaaattcagtgattcattacttattcatcatcctaaactggcatataaaataatatgtttaaatcagtctaaaattttcattgtataatctctgaaataactagtccccactccctaaactgtttggtgtaaatatttatctatgtctaatcatttctatgcaaaatagccttatatatattttcattttcataagatcatctaagaatcaaaggaaaagctattttaggcaatgaacataggcagtgatttcaaaatagaatttgagaaatgcaaggatagatggaatcacaaaagatgatctcattcatggtgttttaaaccctacaaatagatttctgtttagttgacctcatttcaatagcttctcatttttttcagaagtgtatttgatgtgtatatttctaataaacttatttttctttttgtacccagtattaaggagcacagcatttatatccactgaacaaaggataactgaaaggaaactccttgatatccaacttggagtatttgtttctcgaatgaatatgagtttatataagtagtttttttcacatacataaaattagaatttgtttgtattattgatattatttcagaacagcggatttaacgtcatagatgatctagatgtgtcctttccttagaaatctttaaaatgaatcacatagtctagaaacagatccagatactacatgctctcatcagaaaggactttcttctcttcgtgtcaagttcagtgttggcaccgtatagacaaagcgtgttaaaatagcagggttcttgttctctgacacattacaagagaggcaagattataaaactgctatgtgtctcattataattcccattagtttcatttgcttcaaaacattcacttctgtgctttttgcaaaagctttcaaacttattttttgatgattctaaaagtaattcttctatgtcttttcctagtgatactagcattagttttcttttccaattgtactaggaggcatgagagattatcgatgccctattttcttgtctaaataggcaacccaaataatcatagtgacctgttcatttatattatctttatttcttgcctcatacttcttcatatttcttcatttcccatgtttccttattctttggagccagaaacgatcacgttaatcactctttccattagttttctcctatacattttctgatctttctctgagccagttaagagtcattcagccatttgataatggacactagtttactttgaccttgcaaacacaaataccctgtttgatctttatttgctgagagcagtaagacagaagaattacaataaactttttagcacccttctgttcaattctttttcagaaatcgttccctcaaaaagcctattctaggctctttcttttggcagtttcctagaattttcctttgcttttcaccaactggaacattatcactagaagtaaactaagggaccatctaattcaacaccctcgttttgtactttaggatactgaagccaagagaagctaatttttttgcctgccataacacaactagttagtgaagcagccaaaactataagggatcttgccaccataagctttatcggcccatccgtttatctcctcaaagcagccctatacctgatttccttatttctgttctctaagtaagccaagctcagaccttagagtgaccttcccctaatccaccctgcctgacatccaataaactgacaaatccagttgattatgaagctacagtgtttttcaaaccataccataattgtctaggctgttgccatgctctacacaccagttttcttattccagtccctccctgccccagtcccagttcactctactcagcctctctactgcaatggataaaatcacagtttccagattcacaaagctcacagctctgccactttctagccttgtatttgtgtttcagttgctgctgaaactctctaagcctattttccatctataaaatggaaaccaacccagaggctcgttgtattacagagatattgcatgaaaagcatttagcgcagtgtctggcccataagaagtcctcagtaaatagtagtcttggggaagcagtagggtgttgtagtaagagagcagagcaggggacagcaaactacaggtctcagtacaaattcaacatggggcctgggttttttttaatagcaggggagctaaaaacagtttacttgttttaataagttgtacgaaacccaaagaagaatatgtaacggagatttatgtgttcctcaaagccagaaatatttactttctggccctttacagagaactttcattaattcctgttgacagctgtcagggtatgaatcctctctaccacttagaaactgtgtaaccttgggcaaatgttttaacctctccaaggtttggtttccctgactgtgaatagtacctatgttacagggttgttatgagaattaaatgagatcatttatatcaggtgcttagctcactagctgaaataggatttaataaatgttagctgacatggttacgtctactcattgttgcagataaatagcctctaagtgcagctttaatagtgattgtttcttaaaatttttgaacaaagtttttctatttcttatccaattaaataaatattccacattctggcattcaatatttctaacgacatcaagcaactctaaaatcattgaatgttttaaagcaacaggaaaccttagaaataactcatctaaactcatatcatagatatggaaactaagggccaataaaaccaaggcttctaggacctgaaatcagatcctctctttttaggtagtgtgatcttcatcgtgcttctgccatgcaatctcagaatttaaagggatttaagaatcattcattttcttcctaaggcaggattcgaccctataaaatccctgtcagtttggtcattcaaacccagtttgagtacagtcattgatgataaatcacccttttcccagggagcagttctggttgtttcaaagtctttataataaatgaaaattggctttcctgaaatctctatatattgatctattcctgcccactggagccaaagagaaacgtcacttctctacatctgtaaaatactcgttgtcaattttcgtatcttctctaagcatcctcgtttcaagctgatgtgaactagttgggtttttgattgttttcattgtcctgctaagtcgaaaagctaagaaaagcttggctctttcatcactgttatatatcccactgtgtaacagaacttgagttcagggtatacactctaaataactgcttttgtaaaagtattcaattatattgatttttttcgttccctctgttgttcctcataattaccctcagtcaagactttcatcttcgtctttatcttcctctgcaagaattaacagtggtcccttttgtgaacttcaaatatctgagactggtctcagttaatttaggaagtttattttgccaaggttgagaatatgcacccatgaaacagcctcaggaggttctaacgacatgtgcccaaggtgtttggggcacagcttggttttatatatatttagggagacatgagacatcaaccaatatatgtaagatgtacatttgttccatccagaagggtgggacaacttgaagcaaggaggggcttccaggtcacaggtaggtgagagataaatggttgcattcttttgagtatctgattcgcctttccaaaggaggcaatcagataagcatctatctcagtgagcagagggatgactttgaatagaatgggagacaggtttgccctaagcagttcccagcttgacttttccctttagtttggtgattttgaggccccaagatttattttcctttcacactttcaatataagctatccagaactgatgataatattccagatatggcccaaccaatggaaatgattgtgtttcctacataccatatcacaatcaaacctgttttgcaccttgcatttactttctttattaatgatgtcattgcaatttagaaaatttggggccacatttacttcttcctctctattatcttcagtttttatttggtcactaaattctgtttgctgactcttatatctaaaaataaaaacactcaaatccagctattcctctctaactactctgcccttccctcagtcctttctcagtgactattaatgatttggccttctaatgattagcctccctgtccccagacttttatccatctttatcactatggctagttatcttgctaaacaacagatctaatcctagtaccccattatattaaaaaaatcttctatagctacagctttctctccctccaggtcagtatccatagcctgtcaagatgtggctttgataaaggacagaaggcagggaaattctgggcagaagagggcaggtccccattgaggacccaccctcaagccaaaaagcctggaaccatggcccaaagtgagaacttacatccctgttttccctcttgaagggtgccttttccaaaaccatccattaccccccacccaccccccaacctgtgcctataaaaaccccagagctcagctggcagaaggaggagaagcagatggatgtcagaaactacagttggacatcaaagagaagcggcttgactttagagggacagtttgacagcatagctttggagaggagtccagctgtggatggtcagactccaggggaagattaccttcccactccatccccttttcagctccccttcccactgagagccactttcattggcaataaaatcccccatatttaccatcttcaatttgttcatgtgacctcattcctcctggatgctggacaagaacttgggtgccatgcgtgtgggtgaaaaaggctgtcacactgaccctccactgagctgttaacacttaagccatctgtgaatggcaaagctaaaagggcgctgtaacacttcctcatgggcaccctcccctagaggctgctgcagggcccgtacggtgttcactcttgccagcactcaaaaatgctggccccagctgctgcacctgctcacctgtgctcccccttccatgaggggtggaccagcgagtgagtggagtttgctcccctccagttcccacccacgaagggatcagggaaatatcctccttcagctccagtgaggcacagtggtatacacctatagtcccaactactgaagaggctgaggtgggaggatctcttgaacccagaagtttgaggctgtaggcactgtggttgtacctgtgaatagccactgccctccagccttggcaacatagcaagatctcatctctaaaaaagaaaaaatatatatgatgtggctccaattcactgatctagcctcttaactgaattccttcctcctggctgggcacagtggcttatgcctgtaatcctagcactttgagaggccaagacaggagaattgcttgagcccaggagttcaagaccagcctgggaaacatagtgagacttcatatctacaacacattttttcaaaaagaattttttcctccctgctccccaccctacccccttgcaaccttatttactcttcggcctctggccctctcgctatgtctttctcagcttcatgcctttgaaaatactctttctatgcctggaaagcccttataaacctggaaattcctattcttattcaactctgagccagtccattttagtggcttagttcagaggctctagatttaaattgcaattctgtcagattctgtctgctttgccaacctcaatcaagttatgtactatgcctcagtttcctcatcagtagaatgaaaataatacagtagtgcttttttcatagggttgtagtgaggattaaatgagatgaagcgtataatcctcatgtacataacacagtacatactatatgtgttgcacatagtaagtgctcagttctttttctttgcattattcttagcacataagtcaagttacatttgctctcccttacgcaaggtcaattgttcttttttatgtgtttacccgttactttgttcatgcatttgttataaccactgccatcataaagcaacttgctatctttgttcataaaacaaatcccagattcactgagctcaaagtgagagaaggaaactttgcattatgtgcagttcctatgcttttctccaaatttcacatctccgttggggatctctcactagttatccttgccatacccccacaccagccttacaattttgcattatgtttcctacatcatgattctaaacggtcctcctgttcgctttctctccatcccatatcgttgcagatagctatttcctctttttaagacagaaacacatttgcattttgcctaagctacatttgtaaattttacagtattttcgaaagacacaatggaatctaggaaagatgcaacagataaagagattaactggccaatttttgagagcaccatccgtaaagtccacgaacaagtgaggcttccttgtcggagaaagcaattcagtcaccataaatgatcattcaagcctgatctcattccctcttgaaactggaaattgaaagcttgttcctctgacagttgtgttgtcagtggatatgcccagtgtgcaaaggactggacaaagggcaaaagtacacatatcccatctggaattctgagtcatccctgagacatcattttggatttgtctactgagatgaaattaaaacatgagtaatcaagcccacacttcttccccctcaaactcatctctttggtatcatcaagaaaatcaaatgctaatagccattgacctcctaattctagtgctcttagctatgataaaacagtcattaacttaatctaaatgttgcaaataaaggagccccatcaaagctgaagccccaaaattatacaaatgagttaactgggaaggcatgggggaaacaacagttttcataagacacactctaaatctagtttattctcttaggaagacttttctcatcaatagagagccacataaagatgccttacctgcctttcacggggactatatcaattggctgtactgtcactcactccaaaactctcaaaatgcctaacacagattcttgattttattgattgcattagatgttacgttttctaaattttcagcaccctggaggtcacctcaggaaatcatgcagtttttgaatgattttccttagaaatacacgtgtagctatacatatgcccatgcgttatttaatcagttagtgaaaggaggaaaacagcatttctattattgacctttctcaatctctgaggagactgtatgtcttgcctacagtccaggattgaaagcaaaagaaaaaggcactgacaaaatagcattttattttaatagcacattatggagagacaaaaaaaaaaaaaaaaaaaaaaaaaccctgggatttcctttgtctaagtagaattgacgtatgggtgagatcagtctctattttactcagtacaagtgcacacatatttatgtacacacatataattgtcatctttgggccgggcgcggtggctcacgcctgtaatcccagcactttgggaggccgaggcgggcggatcacgaggtcaggagatggagaccatcctggctaacacggtgaaaccccgtctctactaaaaatacaaaaaattagccgggcgtggttgcgggcgcctgtagtcccagctactcaggaggctgaggcaggagaatggcgtgaacccgggaggcggagcttgcagtgagccgagatcgcgccactgcactccagcctgggccacagagcgagactccgtctcaaaaaaaaaaaaaaaaaattgtcatctttggaagctaagggccctgtatcagagtatcagaatatacctatatccaggatgcaatgttctccagttttgcattaacatcagctacaaggttcactgccatctaagactaatcaacagtaatagctaaaggacaaaggtcagttcctgagagatatgcctaaattcatctggctatatcttctgttcctcccaaaccctaaccccataaattcttcattgtttagaaggattcatattttttgtttgtttttcatattcccattttattggctggggttagaattgcaatggcagcaaaaaacacagaagctatctacagtggcttaaataaatagagttttatttatctccaatattaagatgtctggaaataaggtgctttgggcccaacagtatcaggactggcatctgtatattttttattgacttttcctcatgcaatatagcagccaccattatttcacagggtgaaaaagagaaggcaaaaagggtgtactatctgagtcttatcatttttataaagccaaaaatttcccagaaaccttttttgaaagacttctacttgtatatcattgtgtagaactgtgtcacatgacagccaccaacaaaaagatggctagggagaagtggttttcaacaggtattgaagtagctaaccggcagtgtctgccggtcttcagttataaacaccagcagctaactctggctaattcaagtcagggaaaacaaaggggatggggtaggggctctttatttaaaagatactcatagaaatgaacgaagtaatttgaaaactaggtctcagaataggacatgaagtataagagttctaaaatctcaaaagcaggaacacatgcatcttctttttaagtgttgtctttgaaatactaagctccaaagtctttccaaccttgtattattttcttcctttgtcagcttcctgagtggcagagtctgagtaacctatggggtctttgaactctttaggggaattgaggaaggcaaaaaggtaccatgattggcagctctactagagtcacaagaaatatggggaaagcgattcctcaaaggaaaaacaaaaacagaaacaacaaccaggcagttagtagaaggatgaaatactggacccacaaagacaacatatgtcttctcaccacacttggtctctctctctctctctctctctcacccttctctctctctcatagtaatgaaactaaagctgcaaaactaaggcctagctattcattgtgatccttatgagatcataaaaaaaatctgtatttaagtggagaaaaataaatggaatatcaactttaaaaaattttttttgagacagagtctcgctccgtggcccagactggagtccaatggcatgatctcagctcactgcaacctctggctcccgggttcaagcaattctcctgcctcagcctcctgagtagctgggactacaggcacgtgccaccacacccagctaatttttgtattttcagtagagacagagtttcaccatgttggccaggctgttccgaaactcctgacctcaggtgatccacccacctcgacctcccaaagtgctgggattacaggcacgagccactgcacccagctggaatatcgatttaattgtaagagaaaaatgcactagtttaaaaatgtgtcctctttatcctcaggttttaaaaatatttttaaggtagtttagaaaaactgaagtgattatttgataaataaatttcaaatgctatcaatggaacaagaatggatattagatatcctgctaacaaggatcatatttttacaagttgtttctccaaagagaacagagctacagctgagattctggtgcgcataaacctttccatcagagctgtagtcacctaacaattcttatatcacaatcttcatatctcaatcccttttccaaataacttcatctttcttaagttgcatacaaatgttataatctaatatttttgagatggatatcatgtgtcataaaaagaaagccattgtaatattaccaataccaagtattagcaaatattgacatagctttagaataaaaataaacagagctcaggttctggctctgccatagctagctagatttatcttaagacttcagtttcctcatatacaaaatgttgatagtatcatcatcttgtaagccttgttgtaaagagcaatttagctaacagtaacagtgtttaacatgcataaagtgaagactcctttctgggctgataagaacgctagtttattcatttgcttatttctatatttttaagcttagagtctgaaaattttcagagtctgggagtcaacgtgtggggtgtgaattggaacttcaccacttactaacaactcccttttgtagtgcttccatttatttatctgttcaataggagtaataatagcactcgctcaaagagttgtctgaggattagatgagacaatgcttgcaaaatgcaaagtggagcacctggtgtatagttggtattcaataatttctagttgttgatatgatgatgacgatgatgatgtattctcttgatatgtgaatgctcatcacaccatcctatggaatatttgattttaagaaaaagttgggtttgttttttttttttgtttttttttttttttgagatggagtctcactctgtcgcccaggccagagtgcagtggcgcaatctcggctcactgcaacctctgtctcctgggtttaagcaattcccctgcctcagcctccagagtagctgggactacaggcgtccgccaccatgcccggctaatttttgtatttttagtggagaccgggtttcaccatatttggccaggctggtctcgaactcctgatcttgtgatccacctgcctcggcctcccaaagtgctgggatgacaggcatgagccaccatgcccagccaagaaaaaatattttaaacaagttaagatcatttactatactgtgccctaagatgaggtgaacatgtagatcatgagatctaattgattttagatgcagttcagttttttaaaagaatgacctgctttccatattaaaatttcaaaacaatgatatgtggagatgatgacagaatatggctgaatgaggtaccttgttatcctcaaccttttggctcagagacctcttccttgctggaaactttcctaaccttttaatgatttattaacattttgcatgcactctttatacctttcattaatgactagttcactgcaaatttttctttgctttatttcctattcttggtgtgacattcattctctatctgtttctatggaagcttttgtgatgcctcagagagaaagaattctgagtctttgaaataatgaaaacattactaaaccataaaacctagatttcaggagcctaatagaggattagagctttattacgtacagccatcttacagtttagccttcaagtctcaattgtggaatgatcttttgtcctttctctccagtgtgcatgtgtgcatacacatatagacacagttcgcgcttcagtcatataaatgggaagccacaaagcttcctagagtacccagatgcagaattagaagacccaatcttgacaccagggtcaggggatctgtggtttggggggacttgtgctggctatattgttgtcacagcaggaacagtttgtgtcggtatagaggctttaacttctagtaaagggatatataatgaaaatgtaagcaaccatcgtttatttttctcacataataggaatttaagagaaagatatacccaaaattggtttattagctcaacagtttcattcagaatccaatgtctttccatctttgcatttgctatccttagcctttggctttggtctttggaattgtcacgcgatggttataaaatggctgccacactccaggaattgcatcatgacagtgtgaatggaaaataaaggaagagtggcagttcttgtcatgtttcagaagcaacagcatgtctccctaacatctctttggccagaactaggtcaagtagctgcatctacctgcaagggaaactaagaaattgactatcagtgctttttaaacttttttttgtgtgtgtggaaatagataatcactagagaaaaaagggagagtggaatggttgttgatgaggcaaccaacagtgtctaccactctatttataaaccttttcttgatttttcctactaaatgtgtggccgttttttttgcttgctttttgttttttgtttttgagatggagcctcactctctcccccaggctggagtgcagtggcgtgatctcggctcactgcaacctccgcctcccaggttcaagcaattctcctgcctcagcctcctgagtagctgggattacaggtgtgtgccaccacgcccagctaatttttgtatttttaggagacatggggtttcaccatgttgatcatgctggtctcgaactccagacctcgtgatccgcccatctcagcctcccaaagtgctgggattacaggtgtgagtcaccgcacccagccaatgtgtagccttttagttcaaggacctttcattataaatcttcatagtccaaacacccggcatattgtctggcacaaaataggaagaaatatttttggacgtgccaaggaatttgcaagacagtgagacaaatagccagtaaaaatgttagcattaatatattattaaaaatagtgagaaatgctccaggcgcagtggctcatgcctgtaatcccagcactttgggaccccgaggcgggcggatcacttgaggtcaggagttcaagaccagcctgaccaacatggtgaaaccctgtctgtacttccagctacttaagaggctgaggccggagaattgctggaacccaagaggcggaggttgcagtgagccgagatcacgtcactgtgctccagcctgggtgatagggcaagactctgtctcaaaaaaataaaaataaaataaaaagaaaaatagtgagaaatgttatgaagacaaagaataggctactttggaagaataatagtgggaacttcttcatagtctaggaaggcctctctgaaaaggatatatttaagctaaaatctgaaggttaggtcagtcatatgaacagggaggggaatggaataatattttcaagacaatgacctaaaaggaggcaagtatggctaggagctaatgactgagggggtgagtggtacaggacaaggctggagagtttattttatgggtaagcagagaaataatataatctgacgtacctgtgaaagtacacctgagctgatgtacctgcaaaacatcatacaatctgatggacctgctgtataaatgagagattgaatgtggcaagagtagaagcaaagaggccaggtaagaggcatttgcagttgtcttgatgaaagaaaatgactactgggagtaagatggcggcaatggaaatagagagaaatgaacagatttgagatgtattttcgagacaaaatctgtatgacttggtgatggattagatgtcaggcatgagggattgaggatgactcccaagttttttttgtttgatcaacttgttgtactgtttgctgaggtgataaagatggaggaggaagcagatttggaaaagatcaacagttcagttttagacatgttcagtttgaaatgtgtgtgatatgtccaagtgcagaagtcaaattcaattatagctcaaaggagagacccgagctagaagcgtaaatgagaaaaatattgatacaaaatggaatttagagcatccagaatggaaatcacttagcatgtaaagagggaagggaagatggcctaggaccaaaccttgataaacttcaagaaaaagaagtcaagcagaggtaggagaagagaagtcagtcaaaaatcaaaagaatatgacatctcagaattcaaggatgtgaataaatgtgtaagtgatggatggctttcggtctgggctttttgttttttttttccattttaagttccaactttgctacaatccggctacgaatcccacaccctcccaaattatctgaggatgttaattgatacttgatcagaaagcagtgatttttaaaatcatatacttctaaattatctgagatatgaagcaatgagatagggaagtggctgaaatatgtttctctggctcagctgtcatgagggcttgctctagaatggcactcaagcacatgtttatccactgagctctatatcatttattccattagctgaagaaggaatctctcacactctaacttcagttctgttggacatgggaataaaagttagatgtatacagactaaactaaacagatggtagaaaaacaaaggattcttaaagtatattggagaaatgcatttctatggtcaattttcttgaatatcctaagatcaggtttcatgtatataattctttacatttcacaaagcacctttagatgtgtctattccatttaaccctcatcctaactgtgtgaagtagggcacagaagtgtagaaatgattttttaaaactcactaagctaatcaatggataatctgtgattataatagaatctgagtttcggcatctttatcttattccttactgcactatatctggaatggtaaatattgttcatctcacaagcaagctcttattgactgatatcagctgcctagagtggtttattgtaaaagagcataaagcaaattggggaagactacaatacagtgccataggctgattagtaatttctaccattggtattaaatgagaaaataatggtacaagtgctttacatttgtctgccattcctaaactaaggcacctcctgttatttataaggaagaatattctgagaagtttaaaagtctcttgttaaatcatttgatgacgttggataaaatggcttaaaataagaatatgcctgttgcacaaataatctacactcccccaagataatgaataagtcagctggagcatctcaagtttcaatatgtagaggatcaaaatgaaatagtcataaaaccccttgcagacatttcttgggcaggcaaactaatttcctagtaaaagaagttggaagttggacaaattgtatatgggaactttctatactacttttgcaaattttctgtaagtttaacttttcctaataggatgctgagattcagctcttccaatggtctcaaatgttttttggttttgttttgttttgttttttgagacggagtctcactctgtcacccaggctggagtgcagtggcgtgatcttggctcactgcaacctccacctcacgggttcaagcaattctcctgcctcagcctcccaagcagctgggattacaagtgcctgccaccatgcctggctaatttttgtatttttagtagagacgggattttgccatgttggtcaggctggtctcaaactcctgacctcaggtgatccgcccaccttggcctcctaaagtgctgggattacaggcatgagccaccgctcctggcctcatttaaccattttgactttcactttttctgtcttcaaaatgaggtattgagctaggtaaacttaatgtcttttttcgctttaattatctaataattctgtgattctcaacttggtgtgttaaaccagattacacctaagaaaccctgaagactttttagctaggagtttaaatattcacttagtcattcaattaatatctattgtgggtctgttatatgccaggcgccattttaggtattgataataaagcagcaaacaagacaaaacccctgccctcaggagagcttacattcttgtaaagaagacagatgataggccgggcgtggtggctcactcctgtaatctcagcactttgggaggccaaggcgggtggatcacgaggtcaggagatcgagaccgtcctggctaacatggtgaaactccgtctctactaaaaatacaaaaaaaaaattagccgggcttggtggtgggcacctgtagtcccagctactcgggaggctgaggcaggagaatggcatgaacctgggagctggagattgcagtgagccgagatcgtgccactgcactccagcctgggtgactgagcaagattccatctcaaaaaaaaaaaaaaccgaaaaacaaagaagaaagatgataaacaagtacacaattatcatataacaattttaaatagtgacagcatgttgaaataaataaagcaaggaagacgctagagagttgttcatggaaggaattgtcattttatataaggtgatcagggaaggttccactgaggaggtgacatttgaggaaagacctgaaagaagtggggagggagacccgaaagttcatgaggaattgtgtcccaaacagggcaacacataaaaagtccttgaggcaagactaagctgattatataacatttaaaagaattaggccaggtgtggtggctcacacctgtaatcccagcacttttggaggccaaggcgggtggatcacctgaggtcaggagttcaagaccagcctggccaacatggcaaaaccgcgtctctactaaaaatacaaaacttagccaggcatagtggtgcatgcccatagtcccggctacttgggaggctgaggcaggagagtcacatgaacccaggaggcagaggatgcagtgagccaagattgcaccactgtactccagcctgggtgacagagcgagactctgtctcaaacaaaaaaaaaaagaattaatttacatatcatgagatcatctagtctaacacccttactagacaagttcaaaaaggttaagacttggccaagatgacacagctatttaatgtgatatctgggttagaattcacctcatctgaattcctctcaaattgtgctctttgaggtcaatgtgccttttaaaaaatgacagaaagcatggctgtagatttcagatcataccaaatttgatggaacaatgaccatttttagcttcctatagagtctaagacttgaacttgccaagggagtcacagctggatttgtaagcatcaaatccacaaatgtacttaatgtcaaccaaggattttgtgtcacctgtaatgctcccccaggaagcccccaagtccactagtcctaatcactgtgtttggcttcataacctgttggcccaaacattacgcaaaaaagagcaatattcccaaggtggtcatgttagttgtggtgagatgtcaaccataagtagatctgaccgaggaaatgccttaaggaagcagctcaggaacacctgagtatatgtgtctagaatgaagcctattaaaaaaactactgcagagctaaagacagctgaaagccattatgacagtcacaactacttgatagattgaaaccaaagagttcctttgtgattagatagatcaggactctaaatcatgtttttacttcatgtgttcattcattcatcatacagtcagtgattcagtaaacaatattgagcatccattatgtgccaagcactgtgttaaattctggaaacacagagatggattagacccctgtccccagggagcataaagactagcagagttagacctccctcccatatgaagaaattaaatgaggtaaggcattaaaagtgctatgattacataatacagaacccaaaggggaaggcattttctgaaaaacagaaaactgaaaataccagcttttcagcctcacacagacataggaaaaccaacccccatcaacatcatctcttcttttttttttattattactatagtttaagttctagggtacatgtgcacaacgtgcaggtttgttacatatgtatacatgtgccatgttggtgtgctgcacccattaactcgtcatttacattaggtatatctcctaatgctatccctcctccctcccctcaccccaaaacagtccctggtgtgtgatgttctccttcctgtgtccatgtgttctcattgttcaattcccacttatgagtgagaacatgcaatgtttggttttctgtccttgtgatagtttgctgagaatgatggtttccagcttcatccatgtccctacaaaggatatgaattcatccttttttatggctgcatagtattccatggtgtatatgtgccacattttcttaatccagtctatcattgatggacatttgggttggttccaaatctttgctattgtgaacagtgccgcaataaacatacgtgtgcatgtgtcttcatagcagcatgatttataatcctttgggtatatacccagtaatgggatggctgggtcaaatggtatttctagttctagatccttgaggaattgccacactgtcttccacaatggttgaactagtttacagtcccaccaacagtgtaaaagtgctatttctccacatcctctctggcatctgttgtttcctgacttttgaatgatagccattctaactggtgtgagatggtacctcattgtggttttgatttgcatttctctgaacatcatctcttaatataaaaagcataatgtgctgatttcacattgcatgcctgtatcaaaacatctcatatgctctataaatatatacgcttaatgtgtacctacaaaaattataagaattttttttaaagcaacaataaatatcttcattagtcaaccaaattaaatctattaatatatccatgtttgtgaacaggatggccacagaaccctgtggatgcttaccacttaaacatttcctgaaacaaatatgtttccaaaacatcttgcctgtctaatctgacaactgcagacatcctaactaggctctgaaggtgctctccatagcactgatgttattgattcagttgttaacagcgcaggcataaatgactgatgataactctctaaacgtcccttcctactgccgttgaaatggctctgggctttatccaagcagggctgctaaatgaatagtagatgtaccagcagaggagaaattggtcctgaggtgaattaactctcctgaggtagatttgtttgtgcttccaacaacctgtacgttaaaccttgtgaaccttcatgtaggaattttgaggagaaatgggcaatttttggaaagcctaatgttttatcagccgctttttcttctcattgagacctgtgtattctcaagggactttggaagtttgccattttaagaacagacttgatgagaattatttgaagtcctccacgtttccatttatcagttttcctaatacagacatcctacgcacatcgttgaaagaatgttctttttgcctcacaggtagatcacaaaagtgggcccataatcattgggtagagggtttctcagctctgagttaaattgcagctgggtattgtttttctgtaataggatcttctctgagtgaatggtgaaacatgcccatttttgaggtcatgagagcagagctttccacatcatggacagaaaagggcaaccggccatggtttcagttatacagggagaggaaacaataggttttgtctctgctttgctattgcttcaacagcagcatactgttggacactcagacattagggcacaatttagacttgtttcacagctgtcatttctttcctcaaaaacaacaaacctgcatgggggaaatgagtctacatttcagggtttttcaagaattgataacataacatgtacttcaccatgaatttatattccacaggtccctgttctcttctctggtcatcagagtacaaaatcacaaccaaaaagcaagaattgatatctatgaagctaaagtagtagtagtagtagtagtagtagtagtagtagtagtagtagtagtagtagtgaagcaggatattaccctgatcccctcgcgggcgggaactggactgcatagccgcttcggtgctggcaggggcagactccactggctcagtctcactgagttccacccctcatgggagaggaagcacaggtgagtgggtacaggagccagggtgagtgcttttgggcgccagcaggaacaaaactctgtgtgggccccatggcagtgtctaggagggtgcccgcgacccttgaatccccagaaggagtgttacagggcccttttatctttgccatctgcagatggcttaagtgttaacagctcagtggagggtcagtgtgacagccttctgtactcgcacttgtggcacctcagatcttgcccattttccaggaggaatgaggtcacacaaactaattggagatggtaaatgcgggggattttattgctgatgaaagtggctctcagcaggaaaaggagctgaaaaggggacagagcaggaaggtaatcttcacctcgagtccagctgtccgcaatcagactcctctctgaagctatgctgccaggctgtccctcggaagtcaagccacttctctccaatgcacaaccatagtttccaacatccagctgcttctcctctgtgccggctgagcctgggatttttacaggcacaggatggagggcagggtgggctatgggtggttttggaaaaggcaacatttgagcaggaaaacagggatgtaagttctcactttgggccacagttccaggcttttaggcttaagggtggggcccttgccagagacccgccctcttctgtccagaatttccctgcctcctgtccctatcagtagtaatagtagtagtagtagcagcagcaacagaagtaatactaactactacataccaagcattatctacgtacttcatatctattcaccaacctaattgttacaactttcactcgcgtccgtgtgaagagaccaccaaacagtctttgtgtgagcaataaagctttgtaatcacctgggcgcaggcgagctgagtccgaaaagagtcagcgaagggagataggggtagggccgttctataagatttgggtaggttaaggaaaattacagtcaaaggggggttgtcctctggtgggcaggagtggggatcacaaggtgctcagtgggggagcttttgagccaggaagagccaggagaaggaatttcacaaggtaatgtcatcagttaaggcaaggaccggccattttcacttcttttgtggtggaatgtcatcagttaaggcaggaacaggccatttaaatttcacttcttttgtgatttttcagttacttcaggccatctggatgtatatgtgtaggtcacaggggatatgatggcttagcttgggctcagaggcctgacattcctgtcttcttatattaataagaaaaataaaacaaaatagtgttgaagtgttggggcggcgaaaattttcggggtggtgtggagagataatgggtgatgtttctcagggctgcttcgaggtggatcaggggtggcgtgggaacctagagtgggagggattaagctgaaggaagattttgtggtaaggggtgatattgtggggttgttagaagaaacatttgtcatgtagaattattggtgatggcctggatacggttttgtatgaattgaaaaactaaacggaataagagaaggagaaaaacaggtattaaaggacgaagaattgggaggacctaggacgtctaattagagagtgcctaaggaggttcagcatagccttgccagcaaagattatttactttaagagttaagagtggtggtttggggatagcaccaagagatatcagctgtgatggcttggagaaacagtgtaaaccagcagtgtaaacaagagcagggcatttatgactagttgagactggtgaataggagtatgactagacagaagataggagggatgacaagttttttggggtgcagtctaagttggtctggtgtctggaatgagactggggcctaataaaaaggagcgtccatacaggagcttaaatgggctgtaccttgtagcattctgaggacaggcctgaattctgagaagggcaagtggtaaaagtattgtccagtcctttttaagttggtggctgagcttggtgaggtgtgtttttaaaagaccattagttcactgaatactaagagcctgagaaactgcttgggtgatttgactaataaagtccagtctgttataggaccgtatagaggtgggaaggccaaaccgaggaattatgtttccctgtgggaaaggcctctacctatccagtgaaagtgtctacctagaccaagaggtattttagtttcttgactcggggcatgtttagtaaagccaatttgccagtcctgggcgggggcaaatcctcgaacttgatgtgtggggaagggagggggcctgaataatccctgaggagtagtagaatagcagatggaacactgagaagttatttctttgaggatagatttccacgatggaaaggaaatgagaagttctaagaggcaggctagtggcttgtactatagcatagcctgcctttgctggtgtgtggccattaggcctggtggaactgccatcaataaaccaagtgtgatcagggtgaggaacaggaaagaaggaaatatggggaaatggggttgaatgtctggtggatcagagatacagtcatgggggtcaggcgtggtatcaggaataatgtgggaggccggattgaagtctgggccaggaacaatggtaattgtgggagactcaacaaagagtgagtacagctgaaggagccggggagcagaaagcatatgcgtcaggtgtgaggaagaaaatagattttggaagttatgagaactgtagagagtgagttgagcatagtttgtgattttgagggcctctaaaagtattagggtggtggcggctgccgcacgcagacatgagggctaggcaaaacagtaaggtcaagttgtttggataaaaaggctacaggacgtgatcccagtccttatgtaagaatcctgactgcacagccctgcacttcagcggtgtgtaatgaaaagggttgggatgagtcagggagagctcgggtgggagcagtctctaaagctgtcttcaaggaatggaaagaggagtggggaaaggatttaggatctatggggtcagctaggtttccttttgtgagtttatataatggttttgttaggatggcaaaaccaggtatctaaagtcgaaagtatctaaccatgcctaggaggaaaaaacttgttgttttctagaagggattggggtttgggagattagtcagacatgatcagcagggagagcacgtgtgtttttatgagaattatgccgagataggtaacaggtgaggaagaaatttgggcttgactgaagtaatgggggctgtctgtgaagccttgaggcagtacagcccaggtaatttgctgagcctgatgggtgtcagggtcagtccaagtgaaagtgaagagaggctggggtgaagggtgcaaaggaatagtgaagaaagcatgtttgagatccagaacagaataatgggttgtggagggaggtattgaggacaggagagtatatgggtttggcaccacagggttgataggcaaaacaatttggttgataaggtgcagatcctgaactaacctgtaaaccttgtctgcttttaggacaggtaaaatgggggaattgtaaggggagtttataggctttaaaaggccatgctgtagcaggcgagtgataacagactgtaatccttttaaagcgtgctgtgggatgggatgttggcattgagcggagtaagggtgattaggttttaatgggatggtaaggggtgcatgattggtcgctaaggagggagtagaggtgtcttatgcttgtgggttaaggtggggagatacaaggggagatgtgaaggaggctttgaactgggggaaaaggcggcaatgaggtgtggctctagcctaggaatagtcagggaagcagatcatttagttaaagtgtctcggcctaatagggaactgggcaggtggggataactaaaaaggagtgcttaaaagagtatcgtctaagttggcaccagagtttgggagttttaagaggtttagaagcctggccgtcaatacctacaacagttatggaggtaagggaaacaggcccttgaaaagaaggtaatgtggagtgggtagcctccgtattgattaagaaggggacggacttaccctccactgtgagagttacctgaagatcggcatctgtgatggtctagggggcttctgaggcaatcgggcagcgtcagtcttcagccactaaaccgagaagatctgggaaggagtcagagagccttgggccagagttccaggggctctgggagtggctgccaggtgagttgaacagtccgattttcagtggggtcctccacagatgggacatggcttaggaggaatcccgggctgcgggcattccttggcccagtggccagatttctggcacttgtagcaagctcctgggggaggccattctggaggaacccctcgcagctgcagttcaggcatttggagttcttctgtgctggagatatggctggggtttgtctcacagtggagggaaggaattgcaactcagaaatacattgctacttggctgcctctactttattattgtacaccttgaaggcgaggttaattaagtcttgtggggtttgagggctggaatttaatttttggagtttaatgtcgggagcagattgggtaataaaatatatattgagaataagacggccttttgaccttttagggtctagggctgtaaagcatctcagggttgttgccaaacgagccatgaactgggcttgtttttttatttgatgaaaaagagcctaaacgctatctgatttgggataaagaaaaaggagcattaaccttgactatgcctttagctccagccacctttttaagaggaaattgctgggcaggtgggggagggctagtcatggaaggaaactgtaagccggaccgggtgtgaggagcggaggtgataaaaggattatagggtggaggagcagaggctgaggaataattgggcctggcgaggaggggagaggtcagatgggtctgtagaaaaggaagattagaaagactgagcgatgcttggggttgggactgaggggacaggtgggagggaaagaaggaagatttggaaggagttgcattgggaacagagactggggaggggcagatgtgtaaaagaatgcctggacatcaggcacctcagaccgtttgcctattttatgacaagaattatttagagcttgtaggatggaaaaattgaaagtgccgttttctggctatttggaactactgtcaagtttgtactggggtcaagtggcatcgcagaagaaaataaggcatttaggttttaggtcaggtgtgagttgaagaggttttaagttcttgagagcacaggctaagggagaaaaaggaggaatggagggtggaaggttgcccatagtgaaggaggcaagcccagagaaaagggagtagagacacggagagaaggggtggggggttcttgtcccccagaaaagcggagaaggggtagagacatggagagaagggttggggggttcttgcccccgagaaaagcggtacttgccgctaaaggtgaaggaccaaggcaggcgtccccgtgtggtcagacacctctgaaatgtgggtgaataatcaggcaggcatccccgcgtgattaaataccaagggaagactcttccgagtccgtgaccggtgccggagttttgggtccacggataaaacgcatctcctgtctctaccagaaaaggaaaggaactgaagttaagagaagggagagattgaagtggggcgccaagattgaaaggagaaagaggttgagggatagtgagaggttggaggagagagtaaaaagaggccgcttacctgatttaaaattggtgtgatgttccttgggctggttagtctgaggaccagaggtcgtaggtggatctttctcacagagcaaggagcaggaggacaggggatagatctcccaagggaggtcccctgatccgagtgatggcaccaaatttcatgcgcgtccgtgtgaagagaccaccaaacaggctttgtgtgagcaataaaactttttaatcacctggatgcaggcgggctgagtccaaaaagagtcagcaaagggagacaggggtggggccgttttataagatttgggtaggtaaaggaaaattacagtcaaatggggggtggttttctggcgggcaggagtgggagtcacaaggtgctcagtggggaagctttttgagccaggatgagccagggaaaggaatttcacaaggtaatgtcatcagttaaggcaaggaccggccattttcacttcttttgtggtggaatgtcatcagttaaggcaggaacaggccattttcacttcttttgtgatttttcagttacttcaggccttctggatgtatacgtgcaggtcacaggggatatgatggcttagcttgggctcagaggcctgacaacaacgatcttgtagataggtactgttgtaattcccagtttacaaataagaagactaaggtatagagagattgagtaatttgcccaaagcccacagctagtaagaagccaagattcaaacccaggtaatatggctgcagacctggtaatcctaaccattacattaggctgactctcgatagttaacttatttaagctagtgttaatcacatcttaacaagtttgagtaataaaatcttaggttgaaaggggccttcaagatctagtctaaatcctttcaggagttcttccacatttctgctagaaaacactttggcctaggcttaaaacttagtgatggggaactcctcactttgtaaagcagcctgttcagttcacaaacaccctaataattaggctgttatctcttgcattgagctgaagttgatcttcccataacctctgcctttctgtctatatgtatgctttggaaatatacacagtaagtgtaaaccctcttggcaaagacagcccttcaaatacttgggaggcattcaattccccccgccacctcccgctctactctcactaccaagtctttagaatagagtacaggtatcaaaatcaaaacaaacagggagtagaaacttagtgccagactttaagtattttttacttataaaatctttttgtgtaacgagtagagcaactcctaactgcatatatgtactaagtttgcaaatggggcaatttgtttttccccatgcactggcatcagaggtggtaaatgctggcctgtcagattcaatgcattttgctgggttagaaccgcaagggctttccaggggaccaagctctctctgctgtaatcattaaaacctgcagaatcctgtgtgactctggggagaagcccagtgctcttggccctcatccaccctcactaggaaagctgcttaaaactaggacagaagaaacaaccactggcttaggatcagtcctcagacctgccttggcactaccccttttattccaaattttgcagtggcacctccaacttcttggtcacgttttgtaccttgtctgtttcctcatataacttcattccaaattccaacccatgctctgacatttcctctccattcttgctagacaggaatttctggatattggatattggcccctgcccataccctgactctgtatattcttttgtcctgctgaccagtttgagcttctgaataacaaaaactccccaaccactttaaagtcctctactttagcttgatgggtccctctcctgtattttctgaccttgactctgctctctgtacaaatagtaattacactcacccccaagcagagaatctgtgtcaaaatccatcaggatatctaagcacatcattatatctgtcaacttccccagactcctgatctcaatcccttattttcaacaacctggcaccgacagagtataatttcttttgtatcatgatgcagtttgatgtgcttttcgaaaggttatggtggtgattttaaagagatctgttttgttagaggaaggaaggaaaatagtgctgtttgcttccatgcagttcctcagagcctatgccagggtgatttcagctcatgagagaatctaaagtctaaagagatgtgtggagattagaaacattggtgtaaaaaatcagattacggagacgtaatatccagggtgtcagaggaggcagggagcttcaatcatgtttgaaactataggtcccacccaacaggatgagaaaatacaggagaagccagaaaaggtacctgcttgtgggtaaaatcaattaaatggaatcaatggtatggtagccatcatttctttcttttcaaattgtggtaaaaacacataatgtaaaatttaccattttaaccattttttagagtatagttcagtaatgttaagtatattcatgttgtcatgtagtggacttgcagaactttttcaccttgcaaatctgaaactgtacccattaaaccacttctcatttcctcctttcccccagcccctggcagccatctttctactttccgtctctatgcatttgactattctaggaacatcatgtaagcggaattatacagtatttgttcctttttggactggcttatttcacgtagcataatgtcctcaagtatcacctattagctgtcattgcttgaacacggttttctgccaagcacatgatctcgttttattcccagcacaactctcaataacaactgtgtaccttttttccctttcacagattaggaataaaaggctctccaagactaggctcagaagcagaagcagttggagagttgcttgcagaaggattattgtcatactgggaagtgctctcaggatttacacctctaagaaactgaaaggggcatgactgcgcagaggaaaagctggttcaccatgcagttgcaattatggctgcagcaggagcatgcagggaagctctggagtaggtttggcctttcagagttgtccccagtaaatcaaatgggtgaagactttaacccatttatgctggaggttgcaaaaatgttttgtgaaaagtcagaccttggcgatgaccttgagcagtaggatataaaaaactcccacaagcttagcgtcccaataatggaacactaggcataaatgagttaatccctgcatcagccagtcattggccctaggtctctccctgagggaggggatgtagctgtgtgaggcagttccctgagggcacattccaatgaaggccccagctgtgagccagcagccaataaggcagcaggtggcccatgcatgcaaaggccctaaagaggaggtccagggtggagcgccacggtgtctactacagatgctgaaagagtaaatacattttatttatttatttatttattttattatactttaagttttagggtacatgtgcacaatgtgcaggttagttacatgtgtatacatgtgccatgctggtgtgctgcacccattaactcgtcatttagcattaggtatatctcctaatgctatccctcccccctccccccaccccacaacagtccccagagtgtgatgttccccttcctgtgtccatgtgttctcattgttcaattcccacctatgagtgagaacatgcggtgtttggtcttttgtccatgtgatagtttactgagaatgatgatttccaatttcatccatgtccctacaaaggacatgaactcatcattttttatggctgcatagtattccatggtgcgtatgtgccacattttcttaatccagcctatcattgttggacatttgggttggttccaagtctttgctgttgtgaatagtgccacaataaacgtacgtgtgcatgtgtctttatagcagcatgatttatagtcctttgggtatatacccagtaatgggatggctgggtcaaatggtatttctagttctagatccctgaggaatcgccacactgacttccacaatggttgaactagtttacagtcccaccaacagtgtaaaagtgttcctatttctccacatcctctccagcacctgttgtttcctgactttttaatgaccgccattctaactggtgtgagatggtatctcattgtggttttgatttgcatttctctgatggccagtgatggtgagcattttttcatgtgtcttttggctgcataaatgtcttcttttgagaagtgtctgttcatgtccttcgcccactttttgatggggttgtttgtttttttcttgtacatttgtttgagttcattgtagattctggatattagccctttgtcagatgagcaggttgcgaaaatttttctcccattttgtaggttgcctgttcactctgatggtagtttcttttgctgtgcagaagctctttagtttaattagatcccatttgtcaattttggcttttgttgccattgcttttggtgttgtagacatgaagtccttgcccatgcctatgtcctgaatggtaatgcctaggttttcttctagagtttttgtggttttaggtctaacatttaagtctttaatccatcttgaattaattttcgtataaggtgtaaggaagggatccagtttcagctttctacatatggctagccagttttcccagcaccatttattaaatagggaatcctttccccattgcttgtttttctcaggtttgtcaaagatcagatggttgtagatatgcggcattatttctgagggctctgttctgttccattgatctatgtctctgttttggtaccagtaccatgctgttttgcttcctgtagccttgtagtatagtttgaagtcaggtagcgtgatgcctccagctttgttcttttggcttaggattgacttggcgatgcgggctcttttttggttccatatgaactttaaagtagttttttccaattctgtgaagaaagtcattggtagcttgatggggatggcattgaatctataaatttccttgggcagtatggccattttcacgatattgattcttcctacccatgagcatggaatgttcttccatttctttgtatcctcttttatttccttgagcagtggtttgtagttctccttgaagaggtccttcacatcccttgtaagttggattcctaggtattttattctctttgaagcaattgtgaatgggagttcactcatgatttggctctctgtctgttattggtgtataagaatgcttgtgatttttgcacattgcttttgtatcctgagactttgctgaagttgcttatcagcttaaggagatttggggttgagacgatggggttttctagatatacaatcatgtcatctgcaaacagggacaatttgacttcctcttttcctaattgaataccctttatttccttctcctgcctgattgccctggccagaacttccaacactatgttgaataggagtggtaagagagggcatccctgtcttgtgccagttttcagagggaatgcttccagtttttgcccattcagtatgatattggctgtgggtttgtcatagatagctcttattattttgagatatgtcccatcaatacctaatttattgagagtttttagcatgaagggttgttgaattttgtcaaaggccttttgtaaatacattttttaaggtcacacaaatgacatatgggacagaacagtgtttaacttcaaaactcatgttctttctgctatactgggccttctctccgaaagaggcctaatttgcacactacagtcaagcttagaatctattcatagttaaaatgtggagtcaaagcccaggaactatgtccttcaattcatctttcattacttacctattccttatcattcccgctgacaccaaccattttttctgacccttgtcatgaggagtgaagttgtatcattgcagcagctttctacttgtactctatgcctaaaatctctccttcctccatctggtcagccaattgctgtcaagttaatcttgcaagaacactacttttgccagtttaatttcgcaaaactcctgctgtgtgccaggagtgtcccagacatcaggtagtctaagataagcgatagtctctgcccctaagccgtttgcaacctttggagagacaacgtcattatcaccaccagcacccccattaagctcagagctaatatatgccagatgagactctgccagtcactgtgctaaggacttgacatacgttatctcccttaattctaacaactactttctgaggtacctctgatgagtagtatcatttttagatacaaaagcagaaacttagcgagttaagtgctttgcccagtggctctcagttgagaaacgaggtagtcacaccaggcagtccaacttcagtacctgagttcttaatcatcatgtttacaactttggctcaacattgtcaccaagatcgggttcaaatacatccattatcaatattctttctgtctccttgtatgtccaaacaaacaaaacaaatgcttccctcctgatgaggaaagtctccaaatcttgatacctgctgtgtctggacagtttttcctgctatttgctgagtgctggaaggattccctcaatccagatgtgattgcagatccagctcaagctcagcgtcctccagggaacctttgaactaaccacccagaaacgagcctttcaccggacactactcattttcacatatctagatcttatttccccatctgaactgtaagtgtcttaagagctgattttgttgttttttaataaaaaataattcttagttttttttcttattaccaaaaaattattcgccattgaagccttctgaatttttaataagaaaactattggtatattgcttcaaaaagaaatctaagcttctagattcttgaaaagggatagtgacagaaccttagaattaatattcaatataactaatctgatgaaaattcagtcattgatacattactgagaactactagatctcagcatttttaattgtagattcacatggagttgtaagaaattatacacggactccacatacctttttaccgagtttcctctaatggtacacctgcaaaactctagttcaatgtcacaaccaggattttgacgtcaatattgtcagtatacagaacattttcatcactacaaagatccctcctattggccttttatagccacacccacttccctgccccccctacctcctacttccagcaactactagtctgttttccatttctttaattttgttatttcaataatgttatatgaatggaaccatacagtatgtaatattttgggatggacttgactcactcaacataattccctagagatttctctttttatatgcagcaagacttgtttcctttttatcgtgagttgtatgctatggtttggatataccctagtttatttaatcactcaccccttgaagacatctgagttatctgtagttttggactattgtgaataaagctaccaacattaatgtacaggtttttgtgtgaacataagtttttatttccctgagataaatgctgaagagtgcaattgttaggtcatatggtagttgaatgtttagttttaaaactgccaaacttttccgaagcgtctgtactattttatattccaccagcaatgtatgagtgatccagtttctctgcatcttcaccaacatttggtgttgtcattattttttatttttagccattctgatatgtgtgtaggaatatctcattgtgcttttaatttacgtttccctcgtggcaaatgctgttgaacaacttttcctgtacttgtttgccatatgtatatcctcctcattgaaatgtctgttcatgtcttttgtctattttctaattcaaaagtttttttatagttcggttttgagagttctttctgtatcagatactagtcctttcttgtgtatagggttttcaaatgttttctctctcatcttttcatcttcttaacaggggatgaaaaagaattttaattttggcgaggttgaatttatcgctttttccttttatggatcatgcttttgtgttgagtctaagaatactttgcctagccctggatcccaaagattttctcctgttcttttttttttttttttttgagacggagcctcgctctgtcgcccagcttggagtgcagtggcccgatcttggctcactgcaagttccgcctcccgggttcacgccattctcctgcctcagcctcccgagtagctgggactacaggcctccaccaccacacccagctaattttttgtatttttagtagagacggggtttcaccattttggctctcctgttttatatgtcttatagttttacattttatgtttaagtctgtgatccatttgatttttatataaagtatgaggtttaagttgaggtttattttttgcatatggatgttcaattgctctagcataattatttgaaatggctggcttgattattgaagtaaggtcagacttatttctctcctgggcttcagacccagccaccttctatgtttcttgtccaccacaacctgaatgtcccacagacacctcagacttaacatgtccccagcagctcattattatcctccttttgtcccaatccaccctcaacatttttccctccctaattgtgctgttcttatgaacgctacgcttcacccaattgcccaagtcaaaaattagggtattatttctgaatctacttttatctttaaatctaacatgatgcattgccaaattctgtcagctctatccccaagccatctcttaattcattcccttatttacacctcccttgactccaatatcttttgactcaaatgctacatagcctctaatttatctccctgatattgttcttgcttccgaatcccttttccacaatgcgcctatagtaatcctcctaaaatgcagatctgattaggtgactctccttattttaaagtctttcttattgttttctcctgccctaaggcagaagttccaacaaatcttgttatcagattctggattaaatcccggcctcagcagtgggacctaagatagtgcctgaatttccatgaacatttattgatgacaaagagggtcttaaataatgagtgatgtagactttccactgtcaacatcacagattctggtttttaatggtattcacatttgccttctccaagagtccaggtttaatgatggtgagacctatcctaagacctggctttgtagtgaggggttacctcatcacagaatcaagaagggacctcgggccgggcatggtggctcatgcctgtaataccagtactttgggaggttgaggtgggcagatcacctgaggtcaggagttccagaccagcctggccaacatggtgaaaccctgtctctactaaaaatacaaaaattagctgggcttggtggcacacacctgtaatcccagctacttgggaggctgagacaggagaatctcttgaacccgggaggcagaggctgcactgagccgagattgcaccactgcactccagcctgggcgacagagcaagactctgtctcaaaaaaaaaagggcggggggacctgggtgcaagtaattctaagaagcaggaataagagaacaagaagaatgaagcgacaaagaaagatgagcaattctctggaactgttgagaagtgtacagaagaaaacaaatctggatataggtagctacagcctgaaatatggaaagccagagcatgtgtatacctgctcctgctcccactggttgagaattgattcctttttcatctgatatgggcaagcattggatctgagtgggacacatcctctccagtgcacccctgccttttccgctgctctgaacttcacacaacgtcggaaagattcaaaacaatgtagaaaatctaagtataaatacaaaaaggaaacaagaagtttttctatcaaagctgtgaactatatgatatgagtaagctcaataaacactgtgcagaagttgggaggggaaaaagagaattgctgccaaagcactaacccctgtggctggctatgcttgcccacccaggaagctcccatgtcatgggggtcaggggaacctagaacagaaagctgaaaggctcagggatcccttttgagaagggatgctggctatacagcacgagttagaacttgcacagaaccgtccactactgctgacactggaatcacaggtgggctgacaagatgtgatgcaagcaccagacatatttgctacaaacctcaaagtggagcagagcagcggcagtgtcagtcttcttggtgtcaatagaatacctgtttatttgttgaattctccctatatgaataataataatacaagaattcaaagcaggataggctttgtgtcattggaggagtatggagaaccatcagtgcagtaagtgtcgtgggaggtttctagacagtttttaaaagtcgatattgagtcaaccatcaaatgtgaacaattctgatatgccagagcatttgtattcttaactcatggggttattacaaagatcaaatgaaataatcattataaagcactttgtgcagtgcctggcacaaagcacgcactcaatacatgttaatgtttatacaattattattattgattgtcagaattatcagccccacatcagcaaagaatagtaggtggtctgtcagcaggaacatggaaacattctcattacatagaagtcagtgttgcagggacagtcattaaaacaggatctaattttagtcttctgagggaaaatgctaggttctccggaaatgttgaatccttcctcgagcatgtagtttaatttttcaaaattatattgcatatcctgtaaaatgaaaatgaaattgtactgctgttcattaaaggcccccaaaaatcttaggcactatacaatataaatgaaaaaaaaggcgttatttttccatagggcataattagaaataaagaagcaaggtcactcacaaatttccgagctataaaggaggaaaggaacaagattttcccccggttattttatagctgccaggttgaactcatacttatccaatgagccccagaatggaataccgttctacaccaactgtactgatgatagtgattcagggagtaaatgataagattccatccttctaaagtgcttttgggattggattctagtaagtttcattttgctattggccaatcacaaaagagactacaatagagaaaagtgaagacatcatgctgaagacagactgctgcatagaaaaggaagagggaccccctaatttagagatatggatggagaaaaaaaggcacttatgctgtagcataagggaaacattaaataaagctataatagaggagaaaatgtctttgaatagaagaaaaaaatcagacagacagaaatagactaaaatgctaaaaaaaaagatacaaaaggacattgaaggggacatacagtgattattacacaaattaaatgcacacagttaaaagggaggtgaaaagcttctaaaaagaatgagtgtgtagtgaacttaattttatcatctttactaagacaaagttaaagtccctaaaatattttaagacacttaaaaaaaaaagtcttaaaattttgagagcctttcagctctgtcaactctagactttccctcctacttaagttttttttcttttttttcttttatcttttttatttatttatttttttttttatgttttttttttttttttttttttttttgagagagagagagagtggatcagccttaataagagaatggtcttctgccaggtggtattctcctaatccctttccagtgagatccacaagggttcaaaaccactttctggggtcttagaggcaccacttatctctcttcctctgctcatatctttctgctccagtgcccgcatagtttgtgttatcagtggtgcgtagcctgagacatccacgacctatgccagctctcgaagtaatgtgattggcatccaaagaaacacaagaagcccatgatttcgtccctttgcaatttaaaatcatatttaaaatgccttttggtcatacaaatttgaaaatgatcttgtaaatcacttccgggaatctatggtcaaaactcagcttagagttctctacttcttaacagagtgcctgccggtaactagtgactgtcaatgagtttgaaaacataaattgatgtgcaaatgctagataatagcaacatcctgtgcaactgggcagcatttctgttgtttggcttttttattttcgtggactctcccaatctgagagaaaatagatttgagttcctttttaatcggtttagacccagacaaggatttaattggtttagaccccattcacctacgtgtgtcactctgtctccaacataacagaggagatgaccaagacaacatgctctccagccaggaggtggggaatactttggtgtcatagcagacaattattgatggaaaactcatgttagaaaatgtaaggtaccttcttctagacggagtaaaaggggcagctgcccagactttcattttaaatagggagcccatgatacaaatcttttaatacaattttaaaaagaagagacatagggggtatctcttaggacctgtcaacaaccaaccctctatcaaatggccaaatcacaggtggtctgcagcttagccaaaatgtccaagtacctttttgtaacacagaatctcctttgaagatccagctttcattaatgatccccagcagctctggtcaatgtgtcttttcacaaatgaagctttttaaaagctttcagtggacaaatgtggctttgagttttcaactaaatctttctgtttaaaaggagtgctgaaatgggcatactttataatcttaaatgctgcacacaaaatactgaaatattattgaccctgagaggttggttcaaatcaaatagcatactcacgtaaacgttctcttttcctaatattagcaacagggaatgtgaaatagagaggggcgggatatgctggataggggtgcaccaaaattttcaaaaagcctcgaaactagtgtatattgataaccttgtggcatctaatatctagtattctttttttttttttttttttgagatggggtctcgctctgtcgcccaggctggagtgcagtggtgtgatctcggctcactgcaacctccacctcccgggttcaagtgattctcctgcctcagcctcctgagtagctgggattacaggcgcccgccaccacgcctggctaattttttgtatttttagtacagacggggtttcaccgttagccaggatggcctcgatctcctaatctcgtgatctgcccgcctcggcctcccaaagtgctgggattacatgcgtgagccaccgcacccagcctagtattctatgtctattatttcttcataatgagactgggggaaatctttggagaattaatgccgcagttggtaaaatcattctataataatgggtaccattctgctctgtcccacatttttatgaagtctctttaaatttaaaaaggcaatgtgctttgtggttcttgagcaacttaaatacgttgctctgaatagttattgtgatgaggtaatttgtaacaacttttaggatcaatgctaattttcttaaatgtttctgtagtttcccctttattataaagtatattaggctggactcttggctgtaagtgacagaaaactcaactcagattagttaagaaacaaaagggtgttggtgacagtggtggctttcagactattgctgcaggcccacctgccatcctcttaacaccctcaacataccctgcagaaaagagagagctactctgacccgagagcttaaagactggtcaagtatgggcttgactctttatggcccaaattgggtcacatgcccacctaggctaggggaatggaatcgtggaattgattgattgattattgttgcaggttgagtcctccaagaagcagatgccagggcagatttattgcagaataacacctgtgaagaaataggggtggaagcagaattgaacaagggaagccatcagatcacaatgcagatcttctagactctgtgtcagcacaacaaggaatgccagagcaaagactgccaattagaggaatactgaattgggcagatctgacaatagtctgtatataactcgggactgttaacttctccttcctcaaccagttatagacatagaataggactctcttatctcaaacatcaatatctgtgtatatgaagtagagggtgaaagtttactgtacactagtggttctcaaccaagagcaagtctgtcccccaggggacatggcaatttctggagacattttcagttgtcccaactggtgaggaggtgctactggcatctagtgggtagaagttgtggatgctgctaggcattctctataattcgtgggatagatagcacaacaaaaaattgcccaggccaaaatgtcaataatgctgaagttgagaaaccttgctctataaagatacatgtcttggccgggcacggtggctcacgcctgtaatcccagtactttgggaggccgaggtgggcggatcacgagatcaggagatcaagaccatcctgggcaacatggtgaaactcatctctactaaaaatacaaaaattagccaggcgtggtggtgcatgcctgtagtcccagctactggggaggccgaggcaggagaatcgcttgaacccgggaagcggaagttgcagtgagccgagatggcgccactgcactccagcctggtgacagagcaagactctgtctcaaaaaaaaaaaaaaaaaaaaaaaaaaagatacatgtcttatgtgtactgaaagaggccacggaaaccttttgttgatacattcttgatagtttttgttcttatatgtagttatgaatacttgagattccatccaatttatttaacttttgaccagaaagggtagattgaattggtgaaacatctatatcctgaatatttaaaagattctgttttttaaaacaaatattaacttgaattaacgtaaatattcttagtagttaaagtccttaaagaccttagtttggtgaacagataagaatcatctgtgttcagcatatgcattgccttatgaagatggtaagtcaaaagtatgagtttatttctgatatttaaatatccctgaggtatagatttgtttactctggaagtttactctgttgtttgtttgtttgtttttgtttttgttttttgagacggtgtctcactctgtcacccaggctggagtgcagtggcacgatctcggctcactgcaagctccgcctccggggttcacgccattctcctgcctcaacctcccgagcagctgggactacaggtgcccgccaccatgcccggctaatttaatttttttgtgtttttactagagacggggtttcaccgtgttagccaggatggtctcgatctcctgacctcgtgatccaccagcctcggcctcccgaagtgctgggattacaggcctgagccaccgcacccggccttactctgttgttttatttcttcattatatattacaaagttgaatgttagggccaggttagatcggaaaacaagttaagtattccttatccaaaatgcttgggaccagaagtgttttggattttttatttttgtggattttggaatatttgcatattcctcatgagatatcttgggatgggacccaagcctaaacatgaaattcatttatatttcgtatataccttatacacataccctgaaggaaattttatacaatattttaaatacttttgtgcgtgaaacacaaaagttttgactgtgacctgtcacatgaggtcaggtgtgaaattttccacttgtgacgtcatgtcagtactcaaaaagtttcaaaatttggagcatttccgattactttggaaaagtctagaaaaagtttgatatcagtgcactgaaatcattttcaagtaggaacaatagcgatactagccctttactcatgcaaaattcacagtttttatctaaacaacacaaaatcattcaatgcttttatatttaatcatctatattcacctaaccataaaaaatcaatttcaatacagtaaggaaaagacaagaaaacgaatcattctaatcactgtattttgaaagttctttgcaaacaaccgtgaaatggttaaaagataggaggatggagaccagcctggccaacagggtgaaaccccatctcttctaaaaaatacaaaaattagccgggtgggttggcgcatgcctgtaatcccgggtactcgggaggctgaggcaggagaattgcttgaacctgggaggcaggggttgcaatgagctgagatcatgccactgcactccagactgggcaacagagcaggacgtctcaaaaaaaaaaaaaaaaaaaagatggtaagagaatgatgacttgttgcttactaaaataaaggaaagattgacactataagtgatactgtttgaaatctcaggaatctctgaatcattaagattatatcacaaatggcatgcaaaatacctgttcaaaaaatactcctcatggacatgagatgctaagctgctgatactgagtctgacctaggacaatgatgttctgtgtcacctcttttctgatgcctcccagattgctcctggcctcactgctgtctcacttccaaaaatacatattgcccttattggtcataacacagagactatcagttcaaaagtctctaattcgtctcagctgcagtcatctcccagcaagacacaaggttcttgagaaaagaaatttttcatgtcccatctttgccatccaccacacgatgaacatacagtacagtgtacatagcagcccttgaaaatgctggtggaatcattgattcttgaacccaactgtcatactttccagatttaagtcctggtaaatgattaaaatcgtatgggttaccctcaacaaaccagctcaagtatttactataaaaaagggaagctagatatggaacttcccctaaagatgggtctgtcaaactcaccccattgtattctgctctgacaccatgttttttgtttgtgttatttttttttaagagacagggtctcactatgttgcccaggctggtcttgaactcctgggttcaagtgatcctcccacttcagcctcccaggtcactgtgagagattacaggcttgcaccaccatgcccagccccaccttttaatacaaataagtaacagttaccatttactcagtgctcaccttataacagatgctgttaaacgctttacacgccttagctcatttttagttaaatacattgtttttgccccagctatggtagggatcttgctaacaatgagaatgaatgataagaggggctttaaggagaattcactgccacacctttcataattttcccatcattcctccagtctttgttcaaccgtccatgatttactgatttgctattacatcaaactatgctgcaacaaaccagtggttccttctgatttttatccatctcctcctcacctagggtgagagtctgaggcttccttgagtctactttctgatattgttacatttaacacagaacatctcttgttttcgtttctggcagcttatcctctcttcgctttctccatgctttcattcatcctaaaacaccattctgacaatgatatttaggttggtacataagtaattgtggttttaccattaccttcaatggcaaaaactgcgatcacatttgcaccaacgtaatatttttcttacttaaaaaattaatgtagagtatggaaatacttgccatcagggaatggggaagaaaatggctagagagacatggtgaaagagagacttgatttttaaataactttttttgtttttcttgaattttattatcatgtgaatgcatttgaaagaaatacaattttaaaataattattaaaaaaatatttgaatgccttcccatgaacaactaaatgaagtctctattcttaaacctgacagtcaagtacagctctggtttgactccaagctacatttctagccttgtattattcaactctttttctgtttatccttcatatccgggcctttactagtgccaaaaaaaaaaaaattgctcattctactcttgtcacccagagtgtttcttctgtttttgcccatcaaaagcttacccaattgtgaaggcccagtttcaaagcaacctccttcattaatttcatccagatactctgtaacccccatagctgtttaggcttgttctagcaatttgcagttatcagaaaaatgagtacataccgagtgccagaaagtggtctctccaactgtgcacattacaacatctcattctctgtgcctccatttcctcatctgtaaaatggtcactatggtgtactttcctcatagtgatgttcattctttcaagtagttagttaggtacctactatgagacaggcactgacctgggtcctgggggtacagtaatgaataaaatagattgagtcctgccctcatcaaatttaccttctgataagaaagacataaatgaaatatacctataatgctcttgaaatagcacttgggatatagtaaatgctctataaatgtttgctattattactgtcattgttggtagtgttgttatgtggtatttctattaacacataaagaaactaaggttcacaggctgttagataagatgctggttaaatagctagtaagggactccaactcaggtcttcctgagtcataaaattcgtggcatttccactacactgatggatgtataccaggctgtacatcagaactatctgtggagacttaaagaaagtaaagattctcaagcctcagcctcaaattaactaaatcagaaattatttagacgagctaagaatctgtatttttttgaaaagttctcaaatagttgtgatacactgtcaaattggggaatgactgcactacattaaaatctttcccataatactttattatgcttatttgtaaatatcaaatctacaaattcactaaagaccatccccttgttttcttatttatttttattttttctgcttcctctcctagcaaagtgccttataaacactcaataagtatttgagtaattaatggcttaattatttaaagttgcacttaaaatgcaaatactcacagctgtggtactggaagcctgttatgaacaatcatttatcttcctagggttatttactaatcagctaaggacaagcagttgggaaagaaaggctgactatttgggaacagaactgagaaggccctcaaaccaaatgttagccacgttattgaacagcctagggccccgccttaactttacctacacttcgttgacaatttcaggtaaaatgcagaaaatatacgctaacaatcaggagattcctccctcacaccattgtagtttcatttcttttaagccgacacatgtctctcttatggaaaatatgggaacaacctgttttaaagaaagaaaaagaatcctttattcttgtcacaccacaaacatggagttcactgctatacgttaagattataaagcaaaatcccaaaaacgcagtgactgattattcacagtagacatatgaagtcaggaagcttattttttctctctttgctaaggcacaaagcctggggctatatgcatttttattacactgtactgtgttgatttcacttgaggattaaaaagagagttgaggcacagtgcacgtatcttgatggattttaggatttcttgctttcgtgaaagaaagaagcttataaagtacctcagattatcgcccagggaagtgtacctacttccatgatgacctagaaattcaatcttttgtttctcctataaaagatcacattgtactttggatgttttccctgtagttttctgcactatgtaaagccacatttggaaaaacaaaatagttttagtttagagttgaagtgaaaatatctgaaatagttcaggaaagtcttatgagcatttggggagcttacaaacagccttgggggtggggtgagggggaatgagggaagagggaggcagggggagagaagaggagggctaggtcagaagtgtgcaaagaagacagagggagagagaccgtagagactgtgagtccatggcagagttttaattctggttctcacacatctacacagagaaacaatggaagcacattgctccatcccctgtcctttactaagaagcgtgaagtaaataacttgtggcttatgatatgcgaagaagagagaagacagaatgttgtaggatttggaagtacagtagatgagatcttccggtttattgatttgtaaagaacggcttgatactggtttgtcagttctgcatcagtgagagaaaagaaaggcgcttttcagtcacttgccagaggaggagagccgggaagtggaaacagggtcttctggcggacaagcttccttgagtggtggtcaaattgactgtgaagggagtcaaggtcaggaagctttggaaatgctgcaaggatggtacgggatttaaggagggttgatttcctcggttaagggttgttgcagacttcagcaaattcccccttccagcctttattaaagaagtgtttagtagaacaaactgaaaatctacaagtatattgttacccaaaatataaaagcttctgccactgagatgaaaatgtttgatttccagtgctttatctttttgcatttatctacctgtttcagtcattcgttaatatgaatttcctaatatatgccgtcttttttttttttttcggacaataccagttctatggtatctcactgatgattatttcaaattgccacttttgttccttggaaatactcctgtgttcaaataccaggaggcataattatgtaattaccatgtgaacattatgctacttatgggccaaaatgcccctagaaaggaatgctccaatggcctcagaaaatttctgtgagaacgatatcttccaaatgtggtataaataaagctcaagaataaatagctaaggctggaatgtaaatgatttaatgtaatgatgttgtaaggtgagagccacttgactttagttcctgttgcaaatcatgagatacattaggaaaacttttaaaagggaacctattttttaagataaaatctgtatcaagttacatcaccttccaggcaaagtaattcaactttcctcttttctctctgagaccaaaaaaaaaaaaaaaaaaaaaggcagaagaaatgcttcctatgatctcttctcttcctgtcacaattttcataagtctgtagatgtaattaaaactaaagattttgacaaatgaaacaggataggaggttgattgctgcttttctaaattaaaatgaatgatacccttaaggtacttgggtctatgaagtcaatttaatgttgatataacctgactccattatcacagaatgaggcagttgcataagcaagaaaaccaataaacaaacatccaaagtgcattttagaaatcggtgaggtgaaagattaaaggcttaacaacggacaaagagcttgctgttttgttctctcttgccttccagtttgatggcagagttcatcagaattagaggaagaatgttcttggagaagcgttgggctggcactaggctaggagtcctattcatatcctgcctcgcttgtcttgcaagcatgcacagccccttcatttgaggcactgtttgcctcagcagagtctgtgtactcttctggtaggttgtatagaacataataaagggggagggctggaggagaaaggacagaaaaaggagggaataaaaaaaggagtcagattaagaaagaagtcagcacagaaatataaaatggaaggaaaaaaagctgtgatgcaggaaccttaaaaggtagattaaggatggtctcagatggcacggcattagtatcaatgccataagtcacacaaaatctattaagaattatgctcctactcagagtgagtgccatgttagcactagttgtttcccgtgatctatcctgaagtcaaacgcaagaaacactgtttaactcctaagtgccctaatgtcaggaaaacacagaaataaactcaaaggaaagacaattcagttaatctttgcattcaacaagcccaggttgttttgccgcagagctatacctatcacaaaacttcattccagaagatggccggtagaggtggctcatgcctgtaatcccagcactctgggaggcccaggagagtttgaaatcaagaccagaacttatctcagactttttttttttttattattttttcagttacaactcaaaagaatcagaattagaataataatggattttaactgaaagggattaccattagttaaaaggattttaactgaaactgtaatcagtctcaggagcgtttcccggataatgtttgggcacgtatttatgagtgttacttgtgaggatttgggagtaagaatgaacgaggaagttcctcccccaacacagacacatgcacacagaaactgtacaaactgaaaaacttcaggacaaaaactcgtgaatagactggagagtcatttgtgtgcatatgtgtggtttatttactagcatcacagcacaagagtttctgtcttttgcttttgtttttgttttaataggctcatttgtgtaagtgtcatgtctgtttcttgcattcccatggatatttatctagggtctagacaaactgagaaccagaaaatcaaaacatacgttcctagttacatattttctctagactggagtaaacatgatttatgtatgtagtaatcagtaagatgtagcttggacactaggaagaaaccacattgcctagcagtgtatttccacatggggaggtaatgcctgtctctcctaaacttctagtgaagataaaactcaaagtagagtaattaacagaaaggtcaaaagacaaagtggaagcccttgagaatctaaaacaaagttaaagaaccaacatttacatttagataaatttatttgaaataatttctaagagccatgatgttgttatcggtcctttttctttctttcttttattcttttggcttatttaaaagcaatgttgaagaaaaaatgaaataaagcttatctttcacaatacacagaggaatggactgagctttgggaaacagtcacagcttggaattaagagtgtgtgtcgtatcgtaatttagttggatgatttggtgctcattcattatacccagaattacgctttcaagtctaccgtattcatacttatctcagtgcctgacaaataagaggaactcaaaaagcctttcattcattcatccattcagtatttcttgatcatcttctatgtactaggcattgtgataaattcttaacaagacagataagatctctgtctttgtggacaataaacttacattctagtcaatatcttttgaatgaatgtagtgatatttcttactgaagctaagaaaggaaggtctctgcaaacagtatactgtctacagaactcatctgaaatgagaagaccaaggagaataatatatagccctcataactctcaaatcttaaatatgattatttaaaaactagagtaaaacaaatgtggaggagatttggacttcagggttgttttataaattgccgttttacatttttaaatctagtattataggcaaaattgaatctaaatggttttcttcttttcttttttttactttcatcatcaaaaatggaagaaaggaagaaaaggaggaaggaagaaaagaaggaaaggaagaagggagggagggaagtttttcaaaagcttgtgtcagggatcttgaaaaagaaatgattcattcaaaatatagttgttaatagtaaagatccgtgaataaacagtacattaattcattcaactaatattaatttagcacctattatatgccaggtactgtgctactcactgaggatttagcagggaaagatgtgtccctgtcctcatggaacatataaaaaaggacctttttttcctgagatgcttttactgaagaattgctgcaacctagattatgagttctcatggaccagatggcagttttctgcccatctgggatagttctgaagaatagaccctcgtgtatcaatcaaggtttcttccagttctaagctttcgtgatctatgatctaatagttgaaacaggatgtatgcttccaaaaagatgttatatttgtattacttttataaaaggaaacagagacatgccctattaattcagaagagattgggttcctcctggctgtttaaatcattctatttaaactcctttatctcttctttcttggctcaccttccaaagctcactcttaccccttttagtctcacttccctttcctttctttaattgctgagacaaattgttcatctctaactggctatacatgacatctccagttaaatgtttcactgttaggacaaattcattatgttccaaatgaattcatacatacatatgctatttcttccttttctgattttcatattgccaccagcaatatcttcattctcccagtcttccttactcgaaatccaagagtttatttgcttcttcagatattaatctccaacaccaaattggatagttcttcctcctttcaaaataccttctcatatgtaccttcttttacattgaatacaatacagccttaattctaatgcatatcaacccaagtctagtaagttacaacagcctctttctgatctcagtctcaggtgccctttcgaatctgttttacactatactgatcttcccaaaccctaactttcctctaaaatagtgagtcatgtcacagaaattttcagtggttctctttgcctgcagggtaaatcttgagcctcagagtctgggacgccttgctttgcatcatcggctttcaacatgactaactaattgtatctcactgtcgtcctcaacaccactgttctgcagccccaagcctttcttcagcttgtcactacttcttacctccaaacctttacacttgcagagatcagggactatagcatttgttttttgcctatctctttcaatattaacaaatacttataaaatgaataaaccaccaaggaaagaactgattgtgccagaacataagacacaggtatatcatttctggcttttgcttcctgttttgtatataccacggtatattgatttaacatacagccagttagaaagatctaatgcatggaggctctcgtttaatagattatcaaatttcatttccttgcataattgctcaaagaataaagtgctttgttcctaagtcccaagctaaagctttcgaggactttggttgctttcaagtttttctcattcataaatttgtttctttatttagccagttgtgcattcaatccacacaaaacctttctccagtgataatttgtggaaagaaatattttatgcttaattcttctcgctgtcataccttctcttaagtttgagttatgaagatggaaattcactttgatctcattttaaaatcttgacaatattgaatgtacactggaaactaccactggagcgctccttgtataagaaggcaaaattcttcagagagaagattgggagtctagaatgaactttgatgctgcatcggctcagtccctatgaaactaacattcttactagagaaagtggcctatggcacagtcataatcctttaccatctacatcttccccttgggatttctttctcagtatgtgcaaagatttctgatcagtgtccactcccatatggcatcttcatcttctcctctctacccccaaacactcacatttatctctagattgatttattcatgaaatgacccattctaaatttagaaataatgacatatgcccaacatttatttgcacgcgttttcccacaacctttctctataatcttatggtatcacattcttcaagaccaggaattgaccttgcattgggccataaaatacgttgaacaactgcagtttcatcgatatgcacactagaattggtctgcattcaataaactgattaaagaaattaaaaagccaattacttattaaatatttataaaatactttttttcaactttaatcttcaggatagcagttaagagcaagacccagactgaatgagtttgaatcctagctctgccaatttactaactactgaagcttaggcaagttttttttttttaacctctcatgcctcagtttttatgtcaatgaagtcggggggaataatattaactcctattgcagagttactgtgaagatgaaataacataattcatattgtcatgccacatattgcttaataaacattagccatttttgtattgtatgtggtgccctgcacattatagtctattgctctccttttttgctttttttttttttttttttgagatggagtcttgttctgttacctaggctggagtgtagtgacacgatctcggcgcactgcaacctccacctctcagattcaagtgattctcctgtctcagcttcccgagtagctgggattacagatgcccaccaccacaccaagctaatttttgtatttttagtagagactgcgtttcatcatgttggccagaccggtctcgaactcctgacctcaagtgatccgcctgcctcggcctcccaaagtgctgggattacaggtgtgagtcaccatgcctggcctattcctctccttttattaaccataatagtagcaagaacagtagctggtaacatttattgagcaattaccacgtgacagaaactaggctaaatgctttacattgtatcatcttatttaattcccacaaaaccctataagttatattattttccacattttactgataaggaaagttaagaataatttacccagggacattgattagtcaaggttctccagagaaatagaagcaacaatatacatatgtatgtatgtatgtatatgtgtgtgtgtgtgtgtgtgtatatatgtatgtctatgtgtgtgtgaatatataaaattaagtattatctcatgcagttggagactaagaagtcccatgacctgctatctgcaagctagagagccaggaaaattggtagtgtgatttcagtcccagtctgaaggcctgagaaccaggggagttgatgatgtaaatcccagtgcaagtgcaggagaagactgacatcccagctcaagcaggcctgcagggaaaaaaggaacatgcctttttgttctgtttaggacctcaactgacaggatgatgcccgcccacattggggagggcaatctactgaatccactgaaccaaatgctaatcttgtctgcaaaacaccctcacagacacacccagaaatagtggtttacctgggcaccccatagtccagtcaacttgacacatagaattaaccattacagacctgcagtcagtgcactcagtgtcagtaggcatacttgtttgttccgcatcgcttctcttctcttctctctctctctctctctctctctctcacacacacacacacacacacacacacacacacacacacacgtaccacatttactcatttactcatccatttgtttggtcaactagtcattaaacaaatatttgctaccatatactatgtgcctcctgcagaaagggttggagacattcgaagagaaaggtaaacaaaaaatggtccctgctatcaagaagtttccaatctattgcaagacacactcatgtccatataactaaaatgaattatatgatagaagtgcttcaggtataaaccatatactgttagaatgctgaggaagccattaattctaacctgggagatgaggaagtaaacatataaacactaacagcattgatctgggagagaagtggggtaagagcattgccgagagaaggagcagcatgaagaagccacgcacaagagttatattggatggaatagtgcaggacaggcaggtagttttggtgggcttagcaggtagagtttgggagtgcagggtcataaggttgggaaggtaggtttgatatgtccctcatgcttttgtgtatataaaataaagtaaatcctgcattgtaggggaaccccacttggttatccacgtatttgggccaagcaaaaatgggcaagtctagggagagagtgaaaaaatgagattgttctggatatacactaggcacttaattgatattggaaggccagagttggtttgagaccaggctacctgagccacttttctgatgagattaacatcgatttttacctctcgggaattctgcacaccacgggaactaccccctgagttctgattgctctgtgcaagctctgatcaacccctagtttagcatggactgttcacaactaaatcaaaatccagagttagagagctaggatgcctggagccaccacttatattggattggcaaaatgccaaataagtaagtatagcatgtcacccgtaaaattattcctttcttccccaccaagaatagaactcactaagttgacagcacactgtgtcaatatattatagaaaaacctaataggaagaaaagaatggcagttttcactgcatgccccctaaaggtatatttcttaataatttccaagtccactgaaaactgaattccgaaaattagttttatcttactacccaccctattttatcccaaatttaagccttgcctgtacttctttgatacttaatatttttttctttgaggtggagtttcactctgtcacccaggctggagtacagtggcgtgatctctgctcactgcagcctccctcctgcctcagcctccctaggagctgggactacaggcatgcgccaccacacctgactaatttttgtatttctagtagagacgggttttcaccatgttggccaggctggcctcgaacttatgacctcaagtgatccagccaacttggcctcccaaagtgctgggattacaggcatgagtcactgtgcccagcccataattaaatattaatcaaccactggttaattaataattatcaataattaaatatcactcaatgatttattatctattaatcaatattgcttctttaaaaatttgtcaaaaacaatagcctaagacttaaagacaagacatgtcatttctgagattctgtagtcacctataccaaatgtcaccctccctaatgtttttgtgaaagtaaagatttgtatttttttatggtactaattgaagcagtagttcatttgtggctgccaatgagttgactgtaaaaaaaaaccaaaatctcattttaacattgtcgagagaggaaatcctttgtgtttggccttggattgataaaaacgagtctggaatactatatacggtaagtgaatattaaaactagagttatgaaatgttgctttagtgttctcagtcttggagactcaaagtatcttatcagaaaggatacattgttttaattgttcctcattatatagaatgagagaacatcatttctctccttttcctcccaggtggccgtcgaggaccgagtcaggcagctgcatgaagcccacagggactttggtccagcatctcagcactttctttccagtaagtcattttcagcttttatcacttaactttattgcatcttgattaataagaataacagttgaaaaaacaaaagaattaagagttgaattatagtaatcttttatcagatgcagtagaagcataaatcatcctgaaatataacttggttgataagttgagaaggttaggaagaggaaggccaattggatcattttgtccagtcttcagctaatgcataattgtttcctgcactatattctcaaatgttaaccatattaatatttttgagtctttttgaaaaatgtggaacactttgctcaggagccatgctagtattctctgtatcattattccaatgttagtatatgggctgctgaagcaaaaacatacttttgagtttttaatttctgcctatcagttcagttcataaagctaataattatgatatcatgtaattataatatgatcatccaatatatgttactgtgactctataattctttaaataattcattaaatgatccctgccttatgaaatgagtgacaattctcaaaagaaggcatacaaatggccaacaggtatatgaaaaaatgctcaacatcactaatcaccagggaaatgcaaatcaagaccacatgatatatcgtcttaccccaattagaatggctattattcaaaagacaaaaaataacagattctggtgagaatgtgaagaaagggaactcttttacagtgttgatgaaaatgtaacagtaaattagtaacagtatgaagattctcaacaaactgtaaatagaactaccttaccatctggcaatcccactactggttatccatcccaaagctaagaaatcagtatatcaaaagggtacctgcacttgcatgcttatcacagcactgtttaaaacagcaaagatgtgaaatcaacctaagtgtatatcaacagatgaatggataaagaatatgtggtatctgtacacaatgaaacactgcaagaatgaaaccatgtcattcacagcaacatggatggaactggaggtcattatgttaagtgaaataaccctggcacagaaagacaaaaatcgcatgttcttactcttgtgggagctaaaaaaattgataataaacatagaatagaatgatagatactagtggctgggaaaggtgtgtgggtagagggggagataaagagagggtggttaatgggtacaaacatccagttagatagaaggactacgttatatcatttgacagcagaatagagtgactgtagttaacaacgatgtgttgtatatttcaaagtaccaagaagaaagggcttgaattgttcccaatacatagacaaatgacaaatactcaaagtaatggatgcctcaaataccctgacttgatcattatgcattctatgccagtaaaatatcacattacctcataaatatgtaaaatattatatatcaataataaataaatactatgcctccaagttgaaacctcagcctatgggcatttcctttccctaactgtttgcatccttcctttttttttttttttttttttttttttttttttttgagagggagcctcattctgtcacccaggctgtgagtgcagtggcgtgatcttggctcactgcaacctccgcctcccgggttcaaactattctcctgcctcagcctcccgagtagctgggactacaggtgtacaccaccaggcccagataatttttgtatttttttagtagagacgaggcttcaccacattggtcaggctggtctcgagctcctgacctcaagtgatccactcgccttggcctcccaaagtgctaggattacattcgtgagccttgtattctccttttgttcttgacctctagccattctttttatttactggttttgctattttattaattatgtttttataattaatactaagagaaataaccttggttaactgaaagtttaagtattagaaaatcctatttatacaatattgcatattaaattggcaagcacctgttttcctctgattaatgttaatttataccactttttatttgattataaaagtatatgtgttgagttttttggtatttaaaaagccatactttaccacatggagttaacatctgttagcattctgatgtatttccttgtggtcatatatgagtatatatgagggtttatccatcattttaacgcaattactttgtgcctagaaatgttacagattttaactagtttaatccttatagcaatcccttcaatcccttaaggtaggtaccattattatacccatttcaatgatgaagaaactgaggcacacattcatacagctagtagatgagggagccaggattgaaactcaagaagttggctccagagtctgtgtttttaagcatcgcactgtaattttacttaatttatatattttatagagaggaagtaattctgtatgatctccattcttctgccatattctttcattgccattttctgatcatttcctttcttttccattctccacgggttaataaaaagatccacgctcacaaatactttaaagtatttgagtagatgttgtcatgtgtgtctccagttggctgttgtctttttgaacaaaatttcctggaaggtgttggtcctgtgtttttgtcatacatcgataatagattaagaagaagtatcttattttctggactggctctaactttattatccgcatgtggtctagttatttggacacagtttcacaatgctttggagttgccaagaaaaagggataagttaaagcagtttatctaaatgagtgggatcgtggcttttaggaacggctctagaaaaatgataaaggctacagatttcgtcttctgcatctttccaaatctctggtctacttaacttgccttggtgacagccattctattcgatttaattgagattaaatgtgataacatactcctaagcgactcataaaccataaataaaaaatagtactattatgaatattaattactcctcagacaccaggtatattcattcatattttcttctccctgactccccctctgaattcccatgtcttacccattaaaacctattttcagaaaatgatatactcatttaacccaagtgataggtaaagtttaatgtgtacttctcctgggttatttgcattttattagtgtgaaaatccataagcctgaggtggtagaacatcggccataagctctgagctgtgaggaaggaactttgaggggccaaggggagcattctcacacctttcaaaccatatcacatcagtgcccacttccagaaaggtcaggcctgttagacacaggtattcataaagagactgatctacctgcctgaatggagccagccccggaagtcatcagtctcttggatgcccatgtggaatatcaatatacgcttaaaagctttgcttgcaggtataaagaaaataccaacttggtttaagggatatttaagaaataggacggtgagactaaggatggattgtttctttacattgtactttttaaaattacaaaggtactctatacacatcaagaaaaatttggaaagcccacagtacaaacaagaaaagaaaaagtatccataatcctatgactcagagataatcactatcagaaatttggtttatatactttctgtatttctcttgtggttgcgtgtgtgtgtgtgtgtgtgtatcaaggttctatcttttatttttttatttttttgttttttgagacagagtgcaatctcagctcactgcaacctcccccgtcctgggttctagcgattctcatgactcagcctcccgagtagctgggattacaggaatacgccaccacgcttggctaattttttgtatttttagtagagacggggtttcactatgttggccaggctggtctcgaacttgtggcctcaagtaatccacccactgaggcctcccaaagtgttgagattacaggcatgagccaccacgcccggcctctctcttttcttttaaaccatgcgcagataaaaacatgctacagttttatgagctgcttttttcccttaaaactatctttccaatattttcgtgtgtttaaatattcttcttcagagtaatttttctaatgactggctaatactctcttctgtggctgtaccaaatttaccaacacaattctaaattgctcaatataaagattatttcacaatctttattatatcgagcattatggctaatatcctttttatacctttacaaatatctcagattctttctacaggataaatgcctaaaggtggaattgtcatgttaaagaatgtttacattcgtaagccttttcaagtgtattgccaaacttacctctagaaaattgcaccagaaattgggtgtgccatccaaaccgtatttgagctaggcatggtgtggctcatgcctataatcccaattctttgggaaactgaggcaggaggatcacttgagcccaagaggtcaaggctgcagtgatccataatccacccccccccgcactccaatctgtgtgacagagcaagaccctgaccctaaatttaaaaaaaaaaaaaaaatcaccatatttgaagcaggacatctctgaagtcacgtatttgctactataaaagcagcttccccccaccaatgaataaaaatatgttttaaatattcctctaaggtcatattaaatgaatttgaattgatacttttttttagacaggcctgagttgatacatgtttagtaatgtgctttcaggttactataaataataatagggtggctcctaaagcttagaaattacaaagaaaagaaaaataaggaggaactactaattgcacccgccagcgtaaacatgcttactgtctctgtttatcttattctctctctctctctgtctcgcacgtgtgtgcactctctctctctctctctctcacacacacacacacacacacacacacacacacacactcccctttggaaattatttggaaattacattaccagctgtctgttgtttatcagaagacagaggcagccttttactaaaaaaaagaattcactgtttcttcctggtggcccaatctctacatgttaaagaaattttttcttttatcttagatctaagagaaaatgagaagagaaaagcattgtgaaatatgacccttctccgctgatagacactaacttgtccttacttctagttttaatacactgctactcctaattgacttctacaacttaaaccaagaaaaaggagaaattctaatagtgtgacttcaaatatgtatataatttacaataaaattatcatttaaattatttaaattatatactaatttatagttatatatgtataattggtaggtatattgtcagtctcttcatatgtctgtgattaagaaagtactaaagtattcattggttggcatagtagtctgaaaattgtccttttcttttgaagagtttaaagatttgttgggcgtggtggctcacacctgtaatcccatcactttgggaggctgaggtgggcagatcacttgaggtcaggagttcaagaccagcctggccaacctggtgaaacccccatctgtactaaaaatacaaaaattagctgggcgtggtggcactcgcctgtaatcccagctgcttaggaggctgaggcaggagaatggcttgaaccctggaggtggaggttgcagtgagctgagatcatgccactgcagtccagcctgggtgatagagagagactctgtctcaaaaaaagaatttaaagatttttcctgaccattatttcaattctctggtcttctgttctaaattctacttttctcaccaagaaagatcactatatatttgggtaaagggagaaatcattctataacagtaaaaagaatccatggttttcttaatattttacaagttccagaggtcccttaaaagaatattttccaagccaggttctttaaaacattaatgttatattaggttttgataactgtcccttgaaaaaaatagtactgattaataagattggaaaaacactaggtttcaaagataagcaagtttatttcttgttagaattcttggaatttttattatacactgagactctaagaggataaggagtctatagttctccagttttaggtgactgtggaagcctttttcaggcacaccagttaatttcacactaaactttatgccatggatcacagtgaatctttgccttaatgtggtatttgccagatgctttaatgacaaaaaatttctgctaaaggttgtagaaacgtgatccaattaaaaagaaaatgagtatttatgaggcaaaagggtcaagtccctctctttactgaagttcccagccccactcccacccaggagccctcttgtgctgtggagtttcctaactggagataagcttagaaagtatctataccagtagtttccaaactctgaggtgtggctcattagcaaatcctaaaatcagtttaatgacttacaaccaacaatttttgactggtatggaatggaatggaatggaacagattagaaaatatcagagtgcattacctaagcaaggttaagtgttgttttggcggtggttaatttgttagatatgtgtgtacatgcgtgtgtgtgtgtgtgtgtgtgtgtgtgtgcgcgcgcgcacgcacgcgcgcacgccagatcacagtgtaaaacgtttttcttctgtgggttgcagtcgaaatagtttgagaaacattgaatcattcgagccctttccttattttacagataatgaaataggtgcagaacgatcaaatgacataaccaaggtcacaaagatagttataatactgggactggaacccagtttctggacatccaagccacacatcacactgccttacccgttaagaagaaatgcccaggccaataactgtctagtctatctgctattgccaacgattattctctcgtatattcctcttcgtttggccatcctaagttgatttacataacctaaatttttctctcaacacctctgggctaaaaactgccttatcaaaatggtatcgatagcggttaagagtaaaagctgtaaaatgaaactgactgggttcaaatattgactcagacactttatgcttttttctttctctttattcttcatctttaaaatagggataatagtaacatatttggtcaattgtaagacacacttttccacccacgtttcaacagttctgaaatcagaatgcaccatacgaccaatgggatattgaattcggtgaaatatggctgtattatttcatagggttacagtgaagatcaaacagttaatatttgtaaaacccttagagtagtgcctggaacatagtaagtgctattcaagtgtttgctattagctttagcattagtatcattattactatcagcttgatagtataacttaatgcatgcctgttagagtcaaactagtcatgaaagtttcattcattctcttgcatttaatggtcagtataagtagttcctctcctttctgaagatgatttccaaggatctaatctgaaagtccagtgttttgcacattagaacggctcaatagttgtttgtataactaacgagtgataaataatcaaaaagatagaccttaatctctaaaatgtcaggatagtattagtcttgttgacagttatattctacagtacctaatgtggtatgtggtacttggtagatgttcagtaaatatttacagaatgaattatgtcttatacccaaaagaagaagaggtaaattcactcttgacattgataatacacagaggcatgagatttagcatagtggctatcacatagtagacactcaataaataatgtgaccttttctgttgcttctcagcaaagactaatagcattcataactttatatggtcgtttttatcaaagtcgactgtaccatgtaatacattaagggaaaaggctgacttcaaaattacagcatgatcacaactatattacaaaataaaataaaaataacagaaatgtacacataaaggaaaaatggaaaataaaaagataccaaaagacaaacagttattgcatcatttctttctttttacttttacaaattttctggtaatagcatgtactacctttgtaatggaaaaaaaacaataaaggtaacattttatactccagcttttaaccagtgacctcttgcagtggcaatgggactctgaaagacaaatttcctttttactatttattctgaatttaaaagctgtttcattgagtgaccttctcagattatgagacactgtaaaaagaaataactgatccattatttcttgcaggctttacaatcttaactgccttaatcatatccctggttaagtctttttctctcttgtcaaagtgactcaagcttttacagtttctccttgatacatagggcctagcagtttgtttctatcttgagagttgccaagctttcatcctggacattccccactacacatacacacttaattttaaaaaataggggaaacctttaagcacatctaataattgctgacatttcacttaacagtgctccaacctatgctaccagtgtcctcaggggacagacaatttgaaatatgagtggggcaataatttaaagcttcagattggcttaaataagccatcatgaggccgggtgcggtggctcacgccagtaatcccagcactttgggaggccgaggcgggcagatcacctgaggtcaggagttcaagaccagcctgaccaacatggagaaaccctgtctctactaaaaatacaaaattagctgggcgtggtggcatgcatctgtaatcccagctactcgagaggctgaggcaggagaatcacttgaacccaggaggcagaggttgcagtgagccgagattgcgccattgcactccagcctgggcaacaagagtgaaactgcatctcaaaaaaataaaaacatcaaaataagccatcatgataaaagtcagaaagaattttgcaggtccaatgtgagatgatttgcaggctaaaattctctttcaagtaaaatctcagggtgaaatgatttgagccagtttcttcagcagtcacatgttgtcccaagtgttaggaatttgggacaaatgccatgtgacctaccagtgatgctgataatgcccctataaattcaaagacagcctttccaatgcccataaaaagcagctacagcagtaataattatattctcttcttaaaatgtgttgtcatggcccttttctcctttagctcaaatgtatactccccaataagctctcagatttatttgctttacagtatcattagcaaccagattttgcatcgttggccctatatatcccatcaatttgaacacatgaggaaacagaacgtttttgtttctgctatgggaatttctgtgctggggctggcttacaatggctcaagagagccaattgtaaaatatacaggaattgtgagctagttattaagcctacctttggtagcttgaaatcaggcatagtgggaagatttactccatggaaattggcaaatactacaaattggggcactttgttttttttttttttttttttttgtgcatagatggtttcccagaaatgactaatttatctatgttatttggatcactcaagtccctgtaggcaaagaatcttcataaacttagcaggaaggatgctcaggatccaaatatttatgtgcgttgcagagtgaccactcatcctggtttgtctgggactttcccggatttagcactggaattcccattttccaggaaatctctgtagtcccaggcaaaccaagatagttgctcaccctagccttaggtaaaatccctagaagtagagccctatttagatagatggggcttcttgtagaagtaatttgttcaggtgaaagggagtgagggaagcaggataaagtaagaaggatgctggtcaaggagttaagtgggaaggaagagactcacttcagcttgatcccacagggagctctggagaacaaattgtccctactttgagataaggggcctgggctttttgtttgtttgttttgagatggagtcttgttctgtcacccaaactggagtgcaatggcgtgatcttggctcactgcaacctccgcctcccaggttcaagctattctcctgcctcagcctcccgagtagctgggactaccgcgcctggatttttttttttttttttttttttgtatttttactagagacggggtttcactaggttggccaggctggtctcgaactcctgatctcctgatccgcctgcctcggtctccaaaagtgctgggattacaggcgtgagccaccgcgcccagccagggctgggcttttattttcccgtgtgaattagtcattggctgtggatttctggggagtaggagatagcaaagcagttcccatttggccaagggaggatttctggtgaaaggaccaatgaggccttagcaaccaacactcacaacaactgcggctgggtgaaccagctcagtaaaagggatctgagtggaacaacaatagtattaacctctcctagactttatgaagctgctatcataccccatgcataatctggctttagagctgaatgggcgcatttagctggatcactaaccaccactccttcgtcacggacttacatggaaattagcccggtggcatggaagagatgagacaaatgtctgtttctttcttatttcatcttcctcattgtgacagattcttctgggcctcatgaggagctagggccaagagaccagcaccagagttctgaatcagttttataacatgggcactattttggtggaatgctggctctgaagggtgtatttttacactacccagaaaatgaaggcatttgtgaatttggcctggggtagcattttgtcatctgtccaaaatacaaagctttgcacaacagaaatagtgggatcacatccctgtgggcaagaatcattactttcgtttttccatttggatgttttccattttcagaacacaaccagtttgggattacaaagtactttctggtgagaactttgaagtgaggacaaaaggcattttgttctttagtagacttacataaactgttcctggtttaaaaaccattctagatttttaaatagactttcagatatctgcagtaaaaatcatcttgatttcaggcgactgcaggtactgctctgttatgtgctatgtctccttaaggctgtaagggacagggataggcttaggtgataaggaacattttcaggatacagagaggcatgaagaataacatgggccgggcgcggtggctcacacctataatcccagcactttgggaggctgaggcgggcggatcacgaggtcaggagttggagaccaacctggccaacatggtgaaaccctgtctctactaaagacacaaaaaattagccaggcatggtggcgcacacctgtaatcccagctactcaggaggctgaggcaggagaatcgcttgaacccaggagacggaggttgcagtgagccaagatcacaccattgcacaccagcctaggcaacagggcgagactccatctcaaaaaaaaaaaaaaagaaagaaagaaaagaataacatggaacaacagacaccacgaaacatgtttgcttctttctgtatatgcatttgctgccatagacttcagactattacagtatcatatcttctctcttctctccacctaacaccttctacttatagtttctactttcttatgacttccattttcttcctttgttatccgactttttaaacttccccacccatctgtcatctctgtttatctctgtgtattacattcaagctctccaagacaaagcatctgattggattagttatttattatccatctaagggtaatgccatctcacaggccacaggccagactgtaaactaggctttcttgacctgggcactattggcatttggggccagataattagtggaatgctggctctgaaaagtgtatttttacactactcagaaaatgaaggcatttgtgagtttggcctggggtagcattttgtcatctgtcctagaatacaaagctttgcgcaacagaaatggtgggatcacacctctgtgggcaaaaattattgggggctgtcctgtgcattatctctggcctctactcactacatgccagtagcactcccctcccttagctgtgacaaccaaaaatgtctccagacattgtctgtctgatgtcccctgttgggtgaaattgcccctagttgagaatcactcctttataccaatgcctgcacaatttgtggtaatgaaagtcatgtggaacactaaatacagtgacctatgcctgaggaattatttgaagttgcttttctgcatccttagggaccctttagtctctcgatgaaagggagtgtcctcagcagacaatcttcaggaattgcatcagctgcctcacccaagatcataccccttacaggggcagctcttcctgatcagtgtaggggaataatgacctggccattttggcccaactcaggagaacattaacattctagctcaagagctcccatggggttgaatgagactgtcactgggtctgcattcaccttgacttctccctatttctattcctgtttctttcacttcccttccacagttgtctatcctgctctctaatcattgccttagagttggcttcctggaggaagccaatctgtgagggggcaatgaaattgacaggcatttagaagcatctaagaaaaaggtattataataggcccattacagtcactgggtaatttgatttactcttgctttcataatgaggttgattattttgttcaggataagtagtgattattattatttaaggtgtccaacctcatgatctccattaataggtaaggactttggggacagcataaaattacatgaatctcttaccttaaaccttaagctcagcagcatacatgcccatgacaggcaagagttagaacgtaagatggtcagtaacatagatcttgaaaggaaatatgttggagtgtgagcactttaagggcatagggcctgcattacttttttattaaaaataattttgcatctaacacaacatcttgcatattagatgcaggatatgccttgattgaatgaataactgggcacttaaaagattgttcccagtctaataaaatgaaagaacttagcctggtgcttagtctaatgtccagaaagagttaatgaacttcactttatcttcagtcagttaagaattgattcactttgttactcaacaaatgtctgttgaatgaccaatgtaaatcaaactctgatctaggaactggggaaacggcagtaaataaaacaaagtttatttattgtggagcttacattttaacaagagaagatggacaatcaggtcatgataagtttgatttaaaaacaaagaataaagcaggctaaaggggctagaggatgggagaaggggacccttttagtggagtggtcaggaatggtgacatttcagtagagatgtgaggaagtacaccagtcagatattgggggacaaagtgttccaggtggaggaaacagtaaaagtaaaggatccaagatggagcatgcttagagggtttgagaaatattaatagcaaggaagccagtatgactgaagccaaggaagaaagatggtgaatgataggaggtcagtgagtgaccaagggccagacgaggaagggtcttatcaactatggttggctatcgttaaaagcctttggcatatatgctttgtgagaagggaagtcatagaattctgagctaagaagtgacatggtgcctgtagcattgttacttactgtgcctgtagtattcattcattcattcctatatttattaacaaaaacgagtcacctgaaatatgaagataaaaagagaattattgccttgggacatttaaataccaatcacaaaagacagacctataaaaaatgacctcctacagtggtagtaaatagtgggtgcaatgggagtagaatggaagggaggaatccattccacagtgagagaaaggagatgttctatctagttgagtattaacgcatattgtccctgaggctacatgcaaatccaaagtagagggtattccttttgataggaacttagcaaagaatgtttataattgcttggtccctgatctcacctagcaagagtcacaagatgcattcagtgatgaaaaatcagtttctcccttctacttagccattctgataagatgaatatctcgggccgggcgcggtggctcacgcctgtgatcccagcactttgggaggccaaggtgggtggatcacctgaggtcaggagttcaagaccagcctgaccaacatggtgaaaccccgtctctactgaaaaatacaaaagttagctgggcatggtgacaggcacctgtaatcccagctacttgggaggctgaggcaggagaattgcttgaacccaggaggcggaggttgcagtgagccgagatcgcgccattgcgctccagcctgggtgacggagcaagactctgtatccaaaaaaaaaaaaaaagatgaatatctccctttccagtttcgtgtgtagtctccttaccgcccttctgttcagaaaagggatttcttacgtatgtataatgaatataaatataggttttagagagcactaatgttttaatgagatagaaataggcagacgagagagaataattgaaggattagtcaacatgagggcaatttgatagggaaagaaaaagtctgagcaggaaatgtctgtggaaaaaaaaaatcgaagaggaatggaatgaaatgagctcatttatggtgtgagttagggacagaagggatttattctcaggaggtgaaaagtgaaggagttcatgttatagaattcgacctagaccagctatcaagggaaagaaagtaattcaaaagacttggtccaggagatctggagcagatacatctattagaggaagattcagttttgaactgcatcttcagttattcctggaacccaacacaaaagctcatgacaaccttgttatcttcaggcaaaaaaaaaaaaaaaaaaaaaaaaaaggcgggggcagcaaggcttatgtcttaaacaagacagcacataacttcaggtcagagaattccattaacatgaatcacccacaccaatttaaataggaaaaaaaatagtaagcttggttatgtaaaaatttagtttaaaaatcagaaccaacaattgaaattaaacaagaatgttttatttatttctaaaaatatttagctatttattttgaattctgaagcaatactaatatagtatataatgataaaacacagttgattttcatagtaaacatcagcatcagaatgccaagaggaagatttgtctccgttcatgttttattactctgagaaccgcgtaacattttttaaagagtcagaaaatggctagaaaaagaggaagaaagattatttccttaactagttccctggtcccatgctttggtggttaacagtcagtttaactctagaaccatggaaagtctctgtcactttcctggttaccctgggattcctcacattggcagtaagttcgtgaatgagataaatatcctgataactagctacattaatgatgaaaataattataaacgtaggagttggaatttttaaaaagtatcgagcgctctgtgctcttaacacagaggaagcattttgcatagattaacccgtttaatcctcacaccaacctttaaaataaggactgttattgtctccatttcacagaagagaaaactgagactagaacaatttactaacatattcaagttcatacttgtaactattatggattatcagccttagaaaaggggttccagacaccagtgaatagcaacccacacgtctcaactgcacagaccaaagaggatgataatccccattaatctttgcatgttagtagaggcagtggctagtaacaaatgggagagactttggctggaggatattttttattctttaatctttatgatactgtttcccctctccccttctctctctactcctctctctgtcagctgtatccacaataatgccacaatataactactatacaagaatataaagcttctgttctcatgcttatgggtctacaggtcaactgtaattcgggtgatctggataaaacttgactggaaagctctacttcatactgaagcatgcctgggttcgcctctaggctgtgagttcagtttagatggtttctaaatgtgttgggttgtgagccccagactaaaggatcagaagcaacctggggcatgttctcatggcagattgccagtgtgacaagcctctgttcacatcatatctgctaaagcaagtcacatggtcaagcaagccaaggtcaaggagctaggaagcacactgcgctcaccatgaggccatggctaaggtatacatgtttagttctttcacaactgagtgaaaaatgggccccaaattcaatctctcctatactctttttgcgttaattgctagttctttctcactcttctcgctttctaatggatgtacatcccatctatgatcatttggtttttaatatctgagttgctccctactgtctcaggtttcaaattttactttccttgaaatttccctggtgcctaatacaatacctttcacacagagagcgttcagcaaatggtgtggactgcctgtcgtcttttaaaagtacatctgcagagacagtaaaggcacctggcgatattgcattgacttgttagtaacctgacttaacccagatggcccaaagactgtaaccaccattacctggaggaaagttccctggtaatgcagtcagccaattatgttcgaatttactcgaaaattccttgagcataaattattcatggctctatttatgtaggtatctatcttcctatatctgaccttaggaagcttgattgctttcttactcttctaataatcaccgtgatgtttttgaagttttctataagtcggttagaagcagcttttttttctttttttttttcatgagtaatgccgcccaactttggctattagactttgtgtgactgtgcagccatcagcactggatattagatatagttttatctctgcaactcagtcaccttgccaagaattttagtatgaactcttgacttcccagatcaaatgtgagcctgatactctaaatgacttggcaatctactgacaaatcccatggtgtggtattctgttcaccatgtgcaatggtctcagagctcagcattatctgtctgacagctcatataatatttacaggttgttattcgttaggaattttagttagccataaagattttcacagctatggcagacattagaggtctcattcatcactcttgtgaccttcctctctggaatgtagcccatctgtctctgctgttgaaatctttatggaaagtctgcccatctttgaaagtttagtaagtgatcttaaagttttcattgaatctttacttttgatatacgatatagacatataaagcactatccttattttaatttaacgttttgaaaagtgttaaatttaacttggcctttcatttaaatgacagaaaacttactcttgctacaggaactatatgcgtcacatcaaaagaaaatagaaatcatacagaaaaaaattggaatgggaaaaattacacatatatacatatatattcaacactaataactacatgaaagcttaaatactgtattataatcctgattatgactttaggaaatgaaaacgatagaaatacattttgcatataatttaacgttataaagaaaccctaagcaaattcagtaatgaagtgaactgaataggctgggttacagagcacaagagagggatgaccaacaatcagatgttgcccctttccatttctgttttcctctttttatacacaacttctcaaatgcttgcttcccctccgtctactccctccttcagcctctgatcactagtgtgaaattgcccttttgaggtcaccagtgatcgtgggatcaaatacatcttcttcttctacacccttagtctgtcaggctcaagaattgcttatacttcaccagctaggctgttcttgtgtttcatcccactttattctagcttctgtattatttttctttgacagcagttctactgccaccgccatttgggggcatttgccagggtacattcccttttgttttcctccactgtactcatctttttttttttttgtacttttatagctttcttggggtataattatatgcaaaaatatgcatatttaatatatgtaatttggtaagtttggacatatgtatacacccaagatactattgccacagtcaaactaaagataacgaacatattcattacctacaaaagttttgtgtccctttgcttttgtgtgtgtctgtgcatggcaagaacacaacatgagatggaccctcttttttttttttttttttttttttttttttgagatggaatcttgctctgtcgccaggctggagtgcagtggcacgatctcagctgactgcaacctccacctcccaggttcaagcgattctcctgcctcagcctcccgagtagctgggactataggtgcgcgccacctcgcccagctaatttttgtatttttagtagagatggggtttcaccacatcggccaggatggtctcgatctcttgacctcgtgatctgctcaccttggcctcccaaagtgctgggattacaggggtgagccaccgcgcccggccgaggtggaccctcttaatccccttaagttttaagtgcactacacagtattgttaactataggcactatgttgtacagcagatctctagaacttactcatcttgcataagtgaaactttatactcattgaataacaatttctcgtttcccctgccctgtcttctggcaaccacttttctatttactgcttctatgaggttgactatttcagacacttcataaaagtggagtcatacagcatttatccttctatgactggcttatttcactgagcatgtctgcaaggcccatccacattgtcaccaatggtaggaaccttcttttttttaatgctgaatggtattccattgtatgaaaatgtggtgtatacatgcagttctctttgtacgatcttccttccttaaagagtccagccattctcatagcatctgctatgattctagtacttatggtcttgtcctttcacttgcatttcagtgaaaagaaccaaacttatgctgatgcaaatacctgtacacaaatgttgataccagctttattcatgattgccaaatgctaatcagtctatgggcctctgattttcactgcataaaatatagactaatctgtttatcattcatgctgatgaatggtggataaatggtctagctaagaatgaaagatctgttgtatagatgtcattggtctaggaagacagagatgtagaaagaagtaccataagcccaggcagttagatactattcaaaggcatttctctctgccatactttatactacatgtggcacattaacagtagttaggagtggattcaaggctgcagataaatgctgcccaggtgagagagaaagaattggttccacaattaaccatcattcagacaacacatcatagctatgtgattacaaacattatttgtgtggtgattaacattttacaaagcaatttcatattgatttcctcattttatcctgacaacattttggtgagggagatatcattattcccattggaatataaggaaaataaggcttaggcaggaaaaagactagcttaagatcatgaagtgataggggagtcaggactcaaatccagttcttctgaatctgtactctggacattttctgctatatccagctccctctcaagatgctggattgggctttgaaatagaaagccaacatcctgagtgcctttctaaactctgagttttacagtctatcaggggaagaggagagtgtgagaggaatgttcccaaataatctactgtatcaagcagtatatctaacttgctttgagaattatgccaactaaatactattgacctgcagaaaattgatttttctctttacacttatatcaataaagagaggcttctgctgccataagtgtaatttatgtaaaatgtttttaaaacattcatagcctttaatcaagtaaatatacttctaggaattttgctttaaaaaagtaactaaaatatgtgcaaagatttatctacaaagatgttcactgtggccttacttagaacagtgaaaaactggagacaacttatatgttcccaaagagggaatttattcaataaatcatggtacatccataagtgggaattttttagcaatgaaaaatctgttgtaaccctacaagcccactcttaagcattcatcttagagaaatgaaaacttatgcttatgcaaacacctgtacacaaatgttgataccagctttattcatgattgccaaatgctaaaagcaacctaatgtctttgaacaggtgaatggataactaagctgtagtacacccatataatggcatactacttagcaatgaaaagaaacaaatcgttgatacagcaatatggattatgcattatgctgagtgaaataaaccagtatcaaaaggttacatactgtatttatatgacattctggaaaagacaaaacaagtctagtagatcctccctaatgccttttgttcaaccccagaggtgagttttctattttacctccagtgattgctgtatcggttatttatctaaactgtccccacttttttgacccacctatgttatcaaactccaaatccaccaagtatgagaaaagtagagagatgaatgaaggtatttgtgttggaattccagaaagtgctcttttggcatgtcttaaaataacattagcattctttttaattttctggttaggcccctatgttgattaaaatatgacttaacaccagggtgcatcacttggaacattctgttcatcatgcatttaaaaacggctgaaataacaacttcccctaaataatgtggcctgtgcttgtgattttcaaaactaccttgggcacaatattgaatcctgtcacctcaaggaaggaaaagcatttgaagatagaattgctaccctttcttgctcttaataacatactgtgtctgtaacacaaaaggaaattcagaggttggttttgcaataaataaatgcatgtgtagtttgctatctaaattcagtggacaataccccatgatgctggtgccgtatgataatggttgatttgtacattcaagaatctgaatcacaaagctgccctggaattacacgtagtggttataagcacatctgtataagaaaataccaaaggacaacccggtgtcatatagaaactatttgccgataaatttgcttttgatgggctactaaaaatggacacatcaggcataaaagatgtgtgtgtctattacgtaggctagctttatgaagaatgacaagcttccactggtacactgagataagaaacagctgttgttggcatcagtactgctacaagaaatgaaaaaattctgtggcacacttgtgagcactgccacatatttgatcaacttttgaatagatggaagaccagaatcatctggcagccccaaatgaaattgtcgacaacccttaagaatctcttgagaaggagcactgaacccaattccgtagaactatcatccaattgtgtgttatttctaaagcaagtagttccagtgtgtgtgtatgtgattatgatggggcagggaaggaatgaggggaggctgttgttattttcctttttttttttttttttattgtgtcaaggacatttttgagcataaaattgtaaggtttcaaacaatgactgcaaagcagttgcttaggtgaatttataaactgtgaatcaaaggggaaaaacatctttcagaaaaaaaatacactgaatctcaccattggacctatttgatggctacacataagacaaaaagcttttttaaggaaaataaatgaacacttaagaactgcaattacaaaagcttgaaatttcatattgatctagaatttataatatttttaaaattctttaaaaatattttcagctatttagttcaagcatattctgataacttctctgacatttaattgaaaattttccccttttaatgtaaacataaaaagtcaactctagataccctacgtaggtcttcccattagctcagccaggcaacgccaattttcctctgtctctcgctgcttagaggttgtttctttcaggccgaaagcccctaagccaggccaggcagccagcagccctctccagcacacttctttctgagagacgcctaagaatagtgtaggaaatccaaagtgattcttctgctatcagaggatggtctagcatcctccaaattagaaagaatttctggaccactagaatgataaaaaaaaaaaaaaactagaaaggtataataagagaaattgtgaggcctcagcccatagatacctttaaggaaagaatagccattcttttctcagtttaggtattcacaggcttggcattcacagccagtgagggctggaccaagagctctctggagttctcttcttccttttatgatgctggtattttaagaagaaggtacactgagcagccaggagctataatttctggctctccaccatgtttcctgctatagagggctagctttttaatatttccataacaacagactctgaccagataggtcaggaagtctagcccatggtttgtttgtttgtttgtttgtttttcagttggagttttgctcttgtcgcccaggctggagtgcagtggtgcgatttcagctcactgcatcctttgcctcctgggttcaagtgattttcctgcctcagtctcccgagtagctgggattacaggcacctgccaccatgcccggctttttttttttttttttttttggtatttttagtagagatagcgtttcctcatgttggccaggctggtcttgaactcctgaactcagatgatctgcctgcctcagcctcccaaagtgttgggattacaggcgtgagccaccacgcctggccttagcccatgtttttaaatcagatcttatttactctgtgaacttatttggacaggagagctgcatcctacagaagaaaaaaggacaagagaagagttgggaagagaatgagaaaggcaaagatggaaagggaagcagggaaggcaggaggaagggaaaagaaaggaatagagaaagaaggacagaaagaaatggaaagtcagagactacttcaaaacagcagctaaatgtcttttttctctgtattaaaaatttccgtctgccaaaatgaaaaagcataattaccggccaaatacaaatccatttcctatatcgtttaaatgacatatctccaaggtacaaaacagcatgtctggttaaaggttgggtgatttgatccctctattactctatataaaacaaagaagctggagtttcattacgcttaaattgtctggcagtgggtgaagttaacttttattagaagctgttctttcatattatacagtgtagtcgaggatatattagctttgacgttttcttacatctcaatacactgcggagtgaatttactgtgagactaatttaaaagggagtttttcataggaggaaataatggtcagcatcagctgtgcttcaaattattagcagaatgaaaattcaggggaaaaagtatagacacataaagttgctagatattaataagaatgcgtcttttatttctgtttctgataatattctgtgtttcttaaagctccagtgtcttaaaactatattcaggaggaagattatattgttgaggaaatgttatagtgcctcctcaacaagattattttgtcttaaagaaagaaaaaaaaccatcagatcaaacagtatataaaatatatttgtagaggttcagctttagggaagaaatcctacaacttaagcctgaaaaaaaaaaaaacaatgcaaagatcattcatttgaccaatacacagtgaagtcataataaaacaaattcctagtatgtgaaatgaaatttcacgtataggattcatcactcataacaaaagtcttattacgctctgatatcagtagacattccctcacttttggtcaccttttctaataagatcacactggtcagctgacattttgaggcaccaaattaagcatctatttggtaagtgaatttggattctctttaaaccaataaagataaaaacaaccatatcagagtgataagcatattactttagcttcaataacttagaatgtaaatatatcacagagggatatttcagctactgaaataataaaatccagtcagtcaaatagtaaaaaatattgagaaccagcaacaggaagtattataaaaaaaagcactcaagggagacacatacaagaaaccccgtcagtctactcattcagtttcttatctgttctataggtttagcagtggaaatgtttgtgggttttttttttcttcgcatttatctttgtgcctgaatgagttcagtttcgcttagattaggacagaaatttcagaacagcaggttaatccatcctgtcttcatgggcagctgagcaaacagaccaatatcagtgtaaaattgtaattctggagattaatgttgtctttcctgtttgcgatgaatttgacctccttgcctttctttttttcctcccttcttttcagcgtctgtccagggtccctgggagagagccatctcgccaaacaaagtgccctactatatcaagtaagttggaagtatcacatttttaaaagagcatttattgtgactaacctgtatattcacaagtgagtttatttttaaaatgcgacattagcctggcctacaatacctgtgtcttttttttcctgaggaagcttggataaaaaacttattctaaaattaccattgtaaatttgctgatgcaatggggaacgacttttaagaaaagtttatttaatgcaggatatatggtgtgttttgtgacagagggggcggatttttcacaatagaaccaaaagctccagataattttattgatagtgggagtcaatctttgcgagaacaatttcttttatttaggggttttctcacatttcttcttccgtcaaagatagaagatttccgcagttatatgtacacaactgttttgggtgaatgaatactacatgtttccaaaaggcagaaagcagcagtcctcgactcgtagggcttagttgttcattcttgatacataacactcagtatttgtcacctaacaacagaaagatactgttttctggaaacatttgtgccagtcaaaagaatacgagtgcttggaagcaccttctgtagtattttgcatgaaatataaatgacaatacattgggtcaacgtggaagagagaggagagaggatattgagtgattacgataccttcacagtctctcatccattgtgcactagagtctaacttaaatttaactttgaattggaaacctcaacaacaattacaatttactgggttcataaaatagtcctcgataccaaccgaagtctttgaacttgcttctgccatgagtctgactaaaaatattagatgttttcccatttttttccgcctgccatcttttatcgaatctgtttttattctttcactgtccatcaattcttcttaattcggttctaaagcaataacagcagtcctagatcttcattactacagtcctcaagaaatttgattttatgcctctattttgttaactcagaaaaatgggagtgaaggtagtcttttgactctttcaggagaaatacatactttaggaaacggtttaccatttgtcttattacatttttccagatgaggtatctcttaacttgaaaattcttttttagtatgtttgattctgctttttagttttcatattttatgaatttaattttattattgttatatttaattcattagtcactcaaaactgtacattttaaatacctatttaaatcacatgctttattaaataatatattgctgtagacatgcactgtatattaccttacatccactgtatattttatggaacaattttcttcaaactctagacagtgatttcctacatcagtgtctttgtcctcacaaatttttatttccgactaagatgtttgagacctgctacttcttcaaccaattcataaagctctcacttttatccaattcctttatgagctgaaataaagactctttttctcctttcatagatgaggttttaggatcactggagaattcaagacacctttaagctattattctccaaatgactacttgtttggggctcactagaggtctcacatggattgctagggtctccccggtcccattgtcctttccctatatattcatcttctccctgatgttacttctactacaagagatcccagtacattgctgtgagggaatggaaatgaactccgtccaaaaaataataaagagacaaattccagaaaagctgtaattcccttctgtgtattagtctcttgctgtttctcagtggaattagagagcagctacatatcctatttgtccaatgctccttcatgtacctaaagaccatggtgatggtattgataagggcacagatctatgaataagaaaacttcaattttagtcctccagtctagtcttagaggctctgtcattaggcgactgtatggctttaggcaagtcacttaacctataaaaatcttggtttctttctttttttttttttttttttttttttttgagatggagtttcactctgttgcccaggctggagtgcagtggcccgatctcggctcactgcaacccctgcctcccgggttcaagcaattctttcgtcttagctcccgagtagctgagactacaggcacctgccaccatgcttggctaatttttgtatttttagtagagacgaggtttcaccatattggtcaggctcgtctcgaactcctgacctcaggtgatccacccgcctcggcctcccaaagtgctgggattacaggcttgagccaccatgcccagccaaaccttggtttctaatttataaaataaagagttggactagatgatatctaagatcctttttagctctaagacgtaatgagcatgactcattcagttgtcctgtccaaacttaaaaaccgaagatctcagcttttgttcgataatatctttatttttaaaattcattattttaatgaacataatgtaaattcttactttaaaaaacaggaattttatttttccactgtttaattagctttagatatgccctatcaacccactccaatttcaccacacacctctttaaagagctcaaatcttggtatataatttaggattattatgcttcctggctcatgataagagagagagaacaataggcaggaaaatttgccaaaaggtgagtatggagaccttaaaagcctctgaaataatcagttccttgaaatgaggaaattacgtaatttctcaaaaatatctctgaaaccttatggagagcaattctctctacaattataatctctttgaaattagggatggtataatttctcaaatatgagtgtaaaatgttaaactgtaatatagggaaaacatacatgtttataaaatgaacattgtcagtaagcagatgattaatggcacttgtgtcttattagccattactattatctaaaatgttctatggaaaccaaattaatttgatgtacaaggttcggtggactttatgcacagcttaatgccgttcataatctgagatgccgtcttggtctaaaaagaacaaaaatacgtttacagtgacagtgcttcaaccagtcctcatttttcctcttttttatcttgtttgtcttgacttccagtcaagagtttttaccacagatgcccagctgcaaaaccaggtgtcttctctggctatgtttttaatgctttgtaactttttcttttcaatgctgggataaagggatcgcccacataacaagaggtttctataccagtggcacagttcctgttggttgttgaattgtgcactcattcttgagattttaagtcattaacatcttttgctctagtttgcaaatcaggcagtgtttatgcctgcatcctgacatcagcttttcatatgaggctaagaaccttgattttgatacttcaaactacgtgtttgtctagtttatttgtccacagcatacatcattgttacagttttcatattccctctcccttggggctcccttattcctgccagcatctctttcaggttatttgattacagctttcattgccactgaaaaaataatcaccaacaatgttcaacctgttacaactgccttttctactctctgccattttgtagttttttggcctactgtcaaactcatgaaaatttcaatataatagcctttaaccagctgctgcattctgttaggatttctttcacctttttatgttgcatgctcccatatgggtaaaccaaacagagccaagagctgggactctcttgctttcttaatgagttagaaaattgttcttctgtattctggactgtcaaaagaatttaggaatcccaaacatgcatgcaggatgttccagtatagatgtcataataaaagcataagaaatatcacactgggtcagaccaacagggcaactagcccggaactctgtcccagatgaagataccaatggttgttttgtcaggtaacctagtacattttaccttaaaaattcggatacatcatgaccacttcttaataatgcattgtaaatcaactggcagtgagtttatccaatggtgtcaaacttttcctattccccacttcagctttgtcttaataataatatgttccataaatgtaccgacttctatataaatataggcattttaatttctcttgaatctgcatcctttaacctcaaggaatggccttaattaaattctttgaaattcagtaaaaacatttatatttatccagagtcgactttagcctcacattcccctactaatgcttttcattttcatcttcccagtctgagaaattctaatcctttttagtcttttagtctgtccttgacggaaagataagctttccccttgattatcttagttgtttttccctggatcttttccagctctgttatatcttctttgggatgtcgtgactagggtggcccaaatattggttatgaaatttgttagcattgtctctagtttccactcactcatgaagaaagtaaatgttatttgctgtctcccattggtgcagaaatggagagatcaattgaggtcataacctcttctgcatatattagttctagccgaaggttggttttctgctacttttctgtaataccagcaaaagtgtttgaccttatatttctgccagctgtcccttaggaaggatttgatttttagacaagctggtcctttcctccttcaaagacgctgtggttgctaaatattgggaagaattcactaatgaaactcaggagtaaacctgctgactccatcagcagtaatgcatttcatcaggttccctttcgaaatatctctgaagcccttcacagaagagtgaaagatggggttcttgggaacttgctaactgctcagctttttttacatgcaatgctcaagaagcaactcatgtccaaaggagtgtttatcttttcctgctggtaattttgaatgttgtatatacattgctgtatatgttgcctgatgaccttgatcgacccttctcttcactctcaatctcaggcatgtttccacaaccatttattgcatctgagttttgctcacaactttctgctgcttcctgcttagcaaaatgcgatataaaaccttattggatgaagttaacagttgcttcagtcaacatttcttgttactgttgctgtttgtgctgacaaaattgctgatttgggttctgactgtcctgtcttcttatggcctaccattcctatagctctatttgtacgagtatttgactctctgcctggaactgtggccatctgtctagatttaccttttggtatatgtggctctctgtatcctgttggtctacattctggtttgaactcacggatcttggtctggtttttagtaccagtgttcccctaactccagtagcatctgaatcttgacaccaccttcccctgccccctactgtattgcctctattactactttcatggcaattttttcggattccaaatatgtcccatgcttaaagcatatcttgctctcattcttgttctagcccctgttggtaccaggcattgctccaattcaagttttggttggttgatttcttccttcataatattgattgctatttcagtacctgtatttatatacagagggagcagtgcctaactacatcttagccttaacagcaatcaacgtgttaaatatccctgtgttggctggtttgcagtagacacgtcttctgacaatgagatgggctcttattataaagaaactggagtatgatatcaacatagaaaacatttcctcaggccgggtgcggtggctcacgcctgtaatcccagcactttgggaggctgaggcaggcagatcacgaggtcaggagatggagaccatcctggctaacatggtgaaaccccgtctctactaaaaatacaaaaaattagctgggcgtggtggcgggcgcctgtagtcccagctacttgggaggctgaggcaggagaatggcgtaaacccgggaagcggagcatgcagtggacgagatcgcgccactgcactccagcctgggtgacagagcaagactctgcctcaaaaaaaaaaaaaaaaaaaaatttcctcatttcttattccagacacctcactcttctaagaatgatacaagtcttctgacattgggtttgaaaatcagttgaattttgtcataatctttcatacaatgtgaacacatcatgtagtatataattttgtgctatttctggtaagatccttcttatgtatatttttcttcaaaatataccttttagcagctaagacaacattaaataggggaaattttaaataggctaggcatcgcaagacttgaattctagttccagctttactgtcacctagctattaatacttgaccaatgggaaattgcttattttctgtgggcctcagtttctccctctgtcatttaaggaagcagaatgacatgatatcataggtcatttccagtactaacattttctgattttgtgaatgttgacttcgaaatagaaattgtttgtgatcattttccagagaagtgaaaatgaatcttcatattgcccttgaggattcttattgcaccatcaatcttatcgggatagaaaggacaaataatattaaatgtttcacttaactatttagcactattgatgataagaagtggatgcaacagagaatcagctgtctaatttgatctgtcagtctttgaggatgctggtgaatgattcggggtaattaaatttttgaaatcactgccaaaagcctgatgctctgacttttcaaaaggctttagtacacaaagataacccagaggtcaatcttctctgctgtgttttctcctctgccatttgatggtttcaaaggtcacgttacctgagtctcagtaagctctggaaccacaatgaaggaatagttggtaatacattattgatgatataatcatgaaaacaattcaggttaagatattaactgaaagagagtgaaaggggtgccatagtgttgtgcagagtgctgagtctggttttggttttatagatcttgttgggagatgtagatgttgatatcatctgtgtctcataggttcatgaaaaaaaccctcacatccttttttgtagtttcataagctgatttgtatcaccttgactgaaataacagactccaggaggatagctgttgttatctctttttctagcatagtgcctcacagataacaggtacttggtaaatattggaatgaattcatgaacatatgtcagtaattctatgtgcttttcagtttgctgactcatttcaccttcaaaacaatcttgtagtatttgtgtgtcaatttagatttaccactcaaatccatctctcatgccctctagacatgaactttagtgttaggaagcatgccgagtgtttgatagagtttctcatagctcctacagtttggtgcttaagggacagtccttggcatggatgtatgaatggtacataccaaaacatgagttctagattccgttctatcttaatctaacaatatgataaggagtataacttagctcaacctcaatgagaaggttgaactagataatgcctgggaccactctcagctctagctttgtttcagtagaactagagtctgtttttcctaaatatcattcatgaggcttcttctggttttctagtggtcaatagagctttaaattgatcaactactgtttttcactgagcattgtggacaggacctactttttgggccaggatatagtagccactgagtcttaacagaatgtcatcaatgatacatttttattttacagaaaaatgttgtaacattctatatggcatatgtcatgtggaaaggtggcaacatatatacatacacctatacatgtggcagctaaaatttaatgtgtgtatggggaaaataatcctgtattataatacacatggtatagcattccctgcctcattcgtggcacttttggaaatgtgagaatgagcatagaacatattcaagttggtttatccaaaagaagaggagtaaattatttcagctatttccccattttctttttctaactttcttaaacatgcactttcttacataatcacgtgttagaaaaaaaccagtagtcacatcaaataaatctgcatttgaaacaactgtatcatatcccaactctgttcgtttgagccatttgcttaacgtgacacccattctactttatgacacataaggaatattgcttaagaaatgttaattggctttccttttctcctctgaaactggattgaagtcttattgacctctattagatactgagtgttcaggtttttaggaaaacactcatagagatatagccccagtgtgagctgcatttttagaatattttctagaacccaaatatgtccctaatcaaagttagtttattttcattcttagcgttcccacgtaatttggggtatgtgtgaattcccaaacattcccgggcctctcctaggcttctctaattgcttcttattctgttcccctgggaagcagcatcctgttcccttcacaaaggtcagcagcaacagcccaggcaatgttttaaaataacttaataaccctgaactgcctctctcttctttgggataatttccttagagcattagtcctttgaacactgacctggttgcagaaaatgcccctttctcagtgggaaaactccaaatcccattcagtcttcccctccttccttccaggggatagggtgggggagtagggggtagggagagggtattaaatactttcttcaggaaaaatgttaacacggtaaaacactctctctctctctctctctctctctctctctctctctgtgtatgtattcttttttaaagaaatagactgtgagtgcattgtataaatcagtgctgtcacgttgcaaattttttaaaccgttgtacaagatagaaaaacagtatctctggatattgactctggaaagcttctaagagcaggtcctagatgagacttagctcactgtcggcattcggcaaatgatcacgttttctgtgataccattaactcctggggggatgaaactgaaaagcctcgctgctcttcctgaaactctcaactgcttttttctgtttttctttctcagcttatccacatccatcttggtccccaaagccattgcatgtcagatggtcagtgcaatgtgtaatttttaacttgcttctttgttgctttagaaggaatcgttttgttgttttctttccttttggtcactatttcttgttcatgagttttctgtaaacagtgtgtctcatagataagtccatgtaatctgctagacaggaagaaaagcaaagtttaatgtgtgcctactatgtgctaaatgacaaagtgtttcatctgtatcttcccatttaatccttgtaacactccacttattatccaataaagaaaaaaacggctatcagtcgggcgtggtggctcatgcctgtaatcccagcactttggcaggccaaggtgggtggatcacttgagctcagcagttcaagaccagcctgggcaacatggcgaaaccccatctctaccaaagatacaaaacagtagctgaatgtagtggcatgcacctgtggtcccagctactcaggaggctggggcaggggaatcccttgaaccagggaggcggaggttgcagtgagccgagatcacaccactgcactccagcctgggtgacagagtgagaccccatctcaaaataaataaataaataaaagttaaaaaaaaaaaaaaggaagaaacagctgagattcaaaaaagttggaggcttatccaagtcattctaataaaggggaggggggagaattgatacttaaaatcatcatgataagaaggatagacattggagattcagaagggcagaatgctgggtgaggggtggataatgagacattacttaatgggtacaaggtgcactactttggtgatggatacactaaaagcccaggttcaccactatgcaatacatccctgtaacaaaactgcacttgtacctcagaaatttatacgaataaaaataaataaatcaaataaaataatcatcatcatctcagctattgcttctagctgtttcaactttctaatgtttttgattgaaaactggccatttgtataaccaaatgtggccaatccaccactgtgaggctgccatcttgggcatcaccaaaactactctagtagtccttccctgcactgttaggtggattttccttggcgtatcttcgcaatcaagttgcagagacctaagttactctttgctgctttgggcaataaaggggaacaaaaaacaaaatgaaacaaaaacttggccagccctgatgtaagcactcttctacctccctgcaggctgagaaaacaaagtatttcttttttttttttttaatttttaaaatgtttgattctggtctaaatcaattaaaatgagatctccccccttcttttttctttttttcttctaaaaaaaaaaaacacaccaaaaaaccgagatacatgtgcagaacgtgcaggtttgttacataggtatatgtatgccatggtggtctgctgcacctaatgacccatcgtctaagttccctcccttcaacccccaaaccccaacaggccctggtgtgcattgtttccctctctgtgtccatgtgttcttaatgttcaactctcacttgtgagtgagaacatgcagcgtttggttttctgttcctgtgttagtttgctgaggatgatggcttccagtttcatgtccctgcaaaggacgtgatctcattcctttttatggctgcgtagtattccatggtttatatgtaccacattttctttatccagtctatcattgatgggcatttgggttggttccatgtctttgctattgtaaatagtgctgcaataaacatacatatgcatgtgtctttatagtagaatgatttatattcctttgggtgtatacccagtaatgggatggctgggccaaatggtatttctggttctagatccttgaggaattgccatactgttttccacaatggttgaactaatttacattcccatcaacagttcaaaagcgttcccatttctccacagcctagccagcatctgttgtttcctgactttttaataatcaccattctgactggtgtgagatggtatctcattgtggttttcatttgcatttctctgatgatcagtgatgttgagctttttttcatatgtttgttggccatgtaaatgtcttcttttgagaagtgtctgttcatatcctttgcccactttttgatagggttgtttgtctttttcttgtgaatatgtttaagttccttgtaaattctggatattagacctttgtcagatgggtagattgaaaaaatgttttcccattctgtaggttgcctattcactttgatgatagtttcttttgctgtgcagaagctctttagtttaattagattccatttctcaattttgtcttttgttgcagttgcttttggcgtttttgtcatgaagtctttgcccatgcctatgtcttaaatggtattgcctaggtttccttctagggtttttaggatttggggttttacatttaagtctttaatccatcttgagttaatttttgtgtaagctgtaagggaggggtccagtttctgttttctgcatatggctagagagttttcccagcaccgtttactgaataggagatcctttccccattgcttgtttttgtcaggtttatcaaagatcagatgtttgtagatgtgtggtattatttctgaggtctttcatggataggaagaatcaatatcgtgaaaatggttatactgcccaaagtaatttatagattcaatgctattcccatcaaactaccatgaccttcttcacagaattaaaaaaaaaactgttttaaatttcatgtggaatcaaagaagaccccgtatagccaagacaattctaagcaaaaagaacaaagctagaggcatcacaccacctgaattcaaactatactacaaggctacagtaaccaaaacagcatggtactggtaccaaaacagacatatagaccaatggagcagaaaagcaaaggatttctaagtcatattccaccacctccatcagggcttccctaagatagagagtatggccaagaccatacttaataaatgtcatggaatgtgtttctcttcataccctcaattgtaagtctttctgaaaggtagcgcgtggtcaatttagatggacaagaagtgctctgcaggagcctttgcaacatttgtgcatgtccttgattttgacaccaccccccgccccccattccagaacagatcgtctcatccttcccttaagccagaggcctatggttctagctttactaggcaaatatatatggtctgtggctataagtcacaatttctcccaagccttgagctgggggaatactgagtctgcccatgtattacatgcagaacatttcatcttattgcagaatgatactttattcttattgcagaatgatattcattattgcagagtgatattctttagtctttattttttatcattataactacatggtgcaaaagaagtatttctcatactttttctcataatgactcaaaattacaaaagcaatctgggcaattaatatgtttttgaagataaataatggcttatgttttctgaagattaagaaaaatctctgtctgaatatagctgggcacagtgtctcaagcgtgtaatcccagcactttggggggtcaaagcagaaggaacacttaagcccaggagttcgaagccagcctgagcaacaaaatgatacctggtctctacaaaaaaaaaaaaaaaaaaatccttggcatggtggcatgtgcttgtggtcccaggcacacaggatgctgaggcaggaggattgcttgagcccagggggccgaaagttgaggctatagtgaaccgtgtttgtgccactgcactccagcttgggcaacacagcaagactctgtctctaggaataaaaaaaaaagaagaaagaaaagaaaaatctctatccgaaaaatgtaggcaccctgtgttaatatgtaaatacaagtgctttatcaaataaaggctagattaattgttttttctcgctcttacttatatcaatactacaagaacttttctgccaaaaaaaaaaatcaaataatagaaaagaatgaatcctagatagagcaggaggggctgagcaggcacagcaaaagttcaaggtggaaatatctttatgcatccaattaaaagtaatttgtgtacattttactcatatatctatatgtacacatacatacatacacagacacacacacatatatatatatatatatatggagagagagagagagagagagagagagaggacaacgaagaggaaactaaagagaataaagggtattaacagcaggtctgtgacttattccctgggggatgtgaagggaataaatgaccttaatagaccacttcataaacatgttaatgacctcccagaccttcttgtttatcttgttaatagtggttaactagaggaaagatacctgcaaatccctatctataaaatgattttagtagggtatacctggcctggctagatagcttattgtaaataaacctggaatgtttggatttatgagtcgtggctggctggagaatagggcatagctacatgaacgtttttctatttttgtaattgacagattataaaatggaaaacttttgagactgaaatgatttcctttcaatgtttctgtgtaaatttttaaaaacgtatctgttaatatgaaaccaaagcacatcataatgggaaataacatggatgttttggaaacgcatgtgtgattatttcaggttccccagggaaataatgttctatctgtgcccagcacttccctataattctttcagtcattaataaagattggtactagataagaatctgagatttgtgtgagtctgatgtgagatccaaatgttatacttacacaatttgtgtttattttagtttaaaaattatctttgccatgagcaagaggggaaaaaaaggaggatgagcgggcctacatatttttccttaacatcttgtcccaagttttaggaaatcacaagtctaagaaaaggccagggtcaggactaggaagtgatataacagttatacatgtctacctttaaaattatataagtaataattaatttttaaccttattttaagcagatcctagaaatagcaagagcctctataacgtcccagctaagaccccaagttttctttcttgtttaactcttgaaatattttgttaattttcagatcccttgtctcctcagttcagctgtaaactctctgacaacgcttgtgccttatgcatctttgcatcatccctagcatgtattatatatctcacatgtaaaaataataataaatacttgatcatttgttttgattttgatgattaagcactggaagctgagctatgatcccaataggtatgcttatttaaagaaaaatagatggcagtccaggcgtggtggctcacacctgtaatcctagcactttgggaggctgaggtgggcaaatcacctgaggtcaggagttcaagaccagcctgtccaagatggtgaaccccgtctctactaaaaatacaaaaattagtctggtgtggtggcagatgcctgtaatccccactactcaggaggctgaggcaggagaatcacttgaaccctggaggcagaggttgcagtgagccgagatcgcaccattgcacttcagccagggcgacagagttgagactccatctccaaagaaaaaaaaaatcacacacaaaaaaatagatggcacggcacagcagcttatgcctgcagtcccaacactttgggaagccgaagcaggaagatcacttgagtccaggagtttgagaccaggctgagcaatatagcaagactccatctagaaataaataaataaataaataatttttaaaaaatagacaataacagataaagaagttccatgttatttttttaaattctagatagccccactggtgttacagtttattaaattacatttggaagcgattttttagcagtccatttattttgtatatttcagtttgttgagagcagatggggttgagtgttgatggggttgattgcctggctagattatgctataaactataaatctttgaaagttactgttttgaagaaagcatctttaagtgaatatattccttcagtagctcctattaccaaaactgttgtgagaatatcttaggaaaacaccttaaaatcctcttctatcaaaactcccaagctttcttcaggagccagcattgttcagtgaatgcatgtaagcctatgtcttaatagagggatccctaacctctggaccatggactggaacagcaggaggtgagtggtgagcaagtgaacattactgcctgagctctgcctcctgtcagatcagtcgtggcattagattatcgtaggtgcacaagccctattgtgaactatgtatgcgagggatctaggttgtgacctctttatgagaaactaatgcctgatgatctgaggtggaacggtttcatctcgaaaccatacccccgcccctgcctcccagtctgtggaaaaattgtcttccagaaaactcatgcctggtgccaaaaaggctggggaccactgtcttaatagatcttgaaaaaagttggagtaaggtaagtggtaaatcctaagacatacattgaggcagagctgcagtggtatccagtagggaagaaaagacttcaagtttagaattcagttatactcaaccagtttttgcctttctctgttaaatattagatatcattaccagacacatacaaaagattttaattgcatgaatgcccgatgttgatacaagagagccgatttttttttcacacatagttttttggggtttttttggtagggagaaacatcatctcatgatatcgttttaaaggtgctttattatcaaggaccttagagctttttctctcactcatatttcatatactcttagtcctcaagccatttctttttactgaaagcactatagagtagcaaaaggcatcattatattgctcagcctcattcatcatcaacaaaattgccaattatattccaagtccttgaatgtattgtttaaaaagatgtataaggtgaaaggaagcagttcaatgttgaggtggaagatgaaacatactgactggtagattcagagcatactaatcttgttttcacttgtgaactggaaaaaattaacatggagggatggagaaaacatgttcaaactacaaagtcattttttctgagaagttatctgactgtaactgtaactgtaactataactcagggtatatcagagggctcaaatgtggaacacttctttaaaattaaaacctaaaagtcctgatgtgtaatagaacgtgtaaaaatagcagcctctgaaggatctgagatgagcagaggaacactgaataatataatctgacagtatgggccatacccttacagtagttgccgtggcctggaaactatagaattaattcagtaaaacatcagaaaaaaagcaacataaatataaaatattttaaattaaaaagactgaataagaacagaaaaaaatcccctagcaaatcaatattgcttggggaagcatgaatcccagaccagcaatattttaatccaaataacttttagttccatcgtgaacacctttatcaccaagttttataaagagtggagtgaagaaaaaaagtacttgaggttgttggaaacacttctcaaagttggtggctttattcagagattcatgcttgactgtaccaacttctgtttaatttatacgtagtactttgtcaatttaggaatttggtttacttgtcctttcctaaatatgtgtattacaaaacaaaaaatagagaaatgataaaataattacaaagatgattaagcaatagtgttggctatagtgaacagattattgccattttatagagtaataatatacctaaggaaatctgtgggaaatttaatttgggatataaaacacagaagtcaggcggagatgaaataataaaccaataggaaattaaatttaggcatgagagtccaaagatgtaaattctatagatgttataaaataatatgtatgcccttacataatttcattactctctgaacttcatttctcagtgaaatatggggaaatgatactgaacagtgcagcagctcttccgcttatgaaccaaccagaagatatataaacaactcttaagggttatacattataaagatataatttagtctggatttttttttaaatttgaaaactaattttatataaaccctaattgggcaattctccattctttgacttgaatattatagtaaatatgttttcccaatttccaagtttcatgtattattttcaaagaaaaaagacaaacttttaaatgtccagctacctgggacttcctctgattatcttttaaggtagttcaaatatatacaatttcaaacaacaacaacaacagcaaaaaatattttgccagacaatatgtcttgtttgtttttaatgttcacaatgtaaagtacacttattgccaaacctcactttcaatggtgttacaaattagccaagtataactagtttgtaaatactaataagaaggttgctgaaattcagccctgaatatttcttttctgcaactccaaagaggaaaatttttgaaatgcaaaccttgacctttatcaaagcctaggtgaagtttgttggaggtgtttggttttttgctggtgctttgttataatgcagtttgaaagtagactagattggcaagacataattggctgctgtgtggagaatgcatttggtggaacacgtgagttaggggtgaggaaatatgaagagccagagtggaagcagggagaccagatagtagtgtgggaagcactggtgttagataagatctagataaaggtagcagtggagatcacaagaggtggttggaatcagggaatatggtttagaaacaatcacaggtcttgctgatgcattggaggtcaggagggacagaaagagggcaatccaggtgtctcctcggctttcagcaggaacaggtacttaaagaggaacaaatttggtagggaaaatcaagttttagtgttccattgcagtacatggtaaccatggctaataataatgtctcatatatttcaaaattgctaaaagaatagatttttaatgttctcaccgcaaaaaataaatgatatgttggtgaggtaatggatacgttaattagcttgatcaactctttctacaatatataccaagatcaaaacatcacatcgtatcccataaatatacaaactattatttgtcaattacaaataaatgaaataaataattttttaaagagatgtcttaaagggtggcttgaagagcttctgtgctccaataatacctgcccattagccatactttgcttccagcaacaacaggaaaacatttaatctaaacaaaaaaaaattgcttgtcaactagatagctactcttccgtgtagaaaccctagagctgcctgggtttagacatgtttaagtttgaggtacttattgggtatctagctgtgcagttcaaaatttggatctgaagctaggggaagacgtcaggacaagagctttaacttttgtaatcatcaatatatacatccttcttagagtcatggggtgggatgccatcatattgggatgagggaggaaaccctgggacttcacaatatcgagctagtttctgttttgcaaaaggcaaatgtattaatgaattcattacattaattaagcaaactatatttattgggggctattgtaccagctattgtaaattttatattttatattatatatatatatatataaaatgctcacaaaataaaggaactaagtcataaatatgcatatgatttacataaaggagctaaaataaggatctctgtttctgtttcaattctttattaaagatctatctaagactataaagacatatataacaaggtacaggaggtaaagagtatattcttaggcatctaaaaatttttcctatgcttttgaaatctgtgtgatttactttcttgaattggcctgtaatataggagtacaatatcattgcagagattaattagtgtgtttgtgaactgttctcaaatgctaaaatgaaagcataaaactataaaatggcatcattattccttaaagaagcatagtttccaagggtgtctctgatcattgtcacagcataaatgaccaatttcacccataattagccaagttagtaagaagttattttttactgggtatattttgtttaacctcagttatatttgtaaaagtagaaactgctacttgttactgctttcagaatttctcacaaatgctaaaatgctttttaattctaatgcacttaaatggtttgattctccttacctaagaaaaacatttatctaaagatatactcttgactgattcattcattgattcatttgtcaatagatgtttatttatcagaatatgtgcaccagatacattgctagatgtaaagggtacatttggtgagcaacatgcatgatacctccaaagtatagccagggaatagataatggaaatgacactaagaatgaatacatattaacacaaaaagagagagagagtcatgtgtcaaggcaatttagcaggagggaacttgtcaatacaagggattaaaaggacagcatgactagggctggaggaggtgaggagaaaactcaaaaagtcctctggctgatgcaaatgaattggatgaggagcctatgaatacaaacgtttgaaggttactgatgaaagccaggtgagagaagatgggatttggaccaagatgatgatagtttggatatggtgagaaaggcatagatttgagagatttttaggaggtaaaaatccttaagatttgaggatagatatcataggaggaagggcgcaaagagaaagcaaaacatgtcaaggaatcacacctagatttctgggcaatgcacagttggtaattctttacagtgagttagggaactctaaagaaagatcagatttagggtggcaatttgattgtaaatgtttggatttcaaatgattggtgacatccaaaaagcactgtaaatagacagatagtgtgcacctaaagaaagaaggaggcgcatctgggttggagtcactaatttacatattacttgtatatagctagtaactgaaaccatgagtgtgaatgagattctgatgctaaattctggaaggtcactttttaaagtgttttgctttttgaagtacaggtgcaatactaaaaataaaaaagactaatttttaaaaattaaattaaaatgaaaagcctggaaagataaacaccaaagttatgatactagttgtagtatgggagagggggcatcagagaggatcggaatttcatcttgaatggtgtattttatttcaaaagaagctttgagcaaagataaaatgttaattctgagcattagaaggaacacatttgtttttttgtactgtggatctttttgtatttcctagaactcttaatctaaatcaaatattgcaaaatatatcactgtaaacaactggttggtcactagctttttaaatactttgtagcaacttggttgcttgtcagaggtcttctttgagtgaagtctttaatttatagttctttatgcttgatcagcataattgcaccaaactgttacttaatctgaaaaatagctgtttcctagagccctacttaatactgaaaacctactgtgtttgtattgcaattgcatttttttttttacttttccccctgcttttcagtttgtataatttctgttaccctatattcaagttcactggttctttccttgtctttgttgaatctacagatgagcccatctaaggtatttttcttttctgttactgcttttaatttctagcatttccatttgattcacttatagtttccagctctatactgaaatatactgaaatatagagctggaaactataagagtgaatcaaatctaatcttgcatattgtcttctaatcttacatattttctatctaatcttgcatattgtctttcttttccctcaagagtctttaaaatattaattatggttattttaaatttcctgtctgatagttccaacaactgttacatatctaagtctggttctgattcttgctttgtctccttagactgtgatttttcttgcttaggcatgctttgtatctcaggggtaaaagtcaggcatcttagatagcgtaatagatactgaggtaaataaacctttgacatggtaatttatcttaatctgactgggaattgggctgtgtttgatgttggtagttgctttggttgtcattgttgagttttgttgctgctgtggccaccagagacttcaaattcctctggtaactttgtttcctcattggaagcttgttagtgtagtggttgagtgtcgggcagaggcattctctaatgtttgaattaatacacagttggcctgggtcttggggatgtggtctttacaattatttctttcccttcctccagaggtagagtaacttcaacctcccattcccttcctggagctgcagtggatatccaccagtgttctcagtctatggccccaaggccctttctcctgcataaggctgaaaaacaacaacaacaacaaacaaacaaaaaaaaacaaacaaaaaaagaacaaaacaaaaccacacatagatgagatctggtgttcccttcccctaaaatgcagtggtatttcctcagtgcctgatatggtttggttctgtgtctccacccaaatgtcatgtcaaattgtaatccccacatgttggaggaggggcctgatgggaggtgaatgaatcatgggggcagatttctccgttgctgtacttgtgatagtgagtgagttctcaagagatctagttatttgagagtatgtaggactttccccttcactgtgtctatcctgctgctgtgtgaagatgtgcttgcttcccctttgccttctgccatgattttaagcttcctgagggctccccagccatgcctcctatacagcctgcagaactgtgagtcaattaaacctctttgctttataaactacccagtcacgggtagttctttatagcaatgtgatgtcttttcctctgaagagaagggtataagcagattcatggtgactagctactgtgacccttccccaatcagcaacacagagggtgttggggaggctttctccagattcttcgcatcctccttgtgaaggcaaggtacagttcctgaaggaagaagcttgcaaaaggttgggactccacctatggcagtagcccccaggatcttcacactctcaggctagctcccacatgtcccccaacaatttaatctccctactagtttatatggcatctgctccagggatccaaatgctcaggcactgcttctggctaaaggccaatctctctccagatttcaggttgttctataatgtcatttctctgatggactgatgaaaagtcattaatttatctgtccagcagttttcttgctacaagtatgggagcaacctctttgcagctctccatctccatctccaagttgaaactggaagtctgagcaatacattttagaaattaatatttgtaagttttccgtgtcataacaaaaataataaatgttcactgtggaaaacatagaaaaagattaaaaatatttaagtgcccatcaccacctagacaactgcaatgaacatgttggtaatgtcttcttccagttttttaaaatctgctgataaaatacaaaagatattgtttatataactttgtatcctaccttttcttgagcaatgcaagtttaaacctaaatacgaagatactctaacttcctactttacatttttgacggcagatgtcagctgtcttcccaagtgcagtacccttggcttaatatcaggtagacaaataaggccaccacaaattcacctttcacctcaataacacaggtaatttgatagttctacagaccctataatattacttgactgaagacccagaatacaagtctttcaaggattactctagaaactatataaagtattggtatcatctcccttcatcatatcttgccaaatccaacaggtttggaacttctgtaggaagatttttgtaacatgaaaaatgcgtgttgcaccttccatatccagcaaatacaccatcggttttttgttggctgcaccaatgacataaaatgatttcactgaatagggggtgacccagaatggaaatgtagagcatcgaaaataaaatcaaccgacgcagtctttgcagcaaaccatgtggaaacaaatttaaatatggaacatactctttccaactcatcttcagatgttgctttaaaatttgtgcaggtgaaaaaaaaatctttattttaaggtaactcaatcttttaccattggagagaatagaattatttttgtttcctcttgtatattcccagttgtttaaatgttctctgtttccttgtgtggacacataaatccaaatatatctaatatcaaggtatttaccatatgcagcactttttcctcagatagttattttttgaaatattcaaatagcttacctgtatcatcccccccatccttttttttttttttttttttttttaagacggagtcttcctctgtcaccaggctggagtgcagtggtgcgatctcggctcactgcaacctccacctcccaggttcaagcgattctcctgcctcagcctcccaagtagctgggactacagttgcatgccaccatacccagctaatttttgtatttttagtagagacagggtttcaccaatttggccaggatggtcttgatctcttgacctcatgatccacccacctcagcgtcccaaagtgctgggattacaggcgtgagccatcacacccagcctaccctattttctaaacgaacaattagttgacttttcttcagttcttactcagaaatatctgaccctaggttccaacttttgttttgctctttgcagttagtttttatgtgtactgttagggagatgtgctttttttttaccttcaaatttaaaagagagagttttcaattccttttaagtcaaaatacaactgttctactctaaagctttctttaaaaaaagaaaagtaccaaatcctcatccgtagtaattaattttgacagtgtaggctcagtagtgattcacaaacctgtattttgtgcatcagcattccttattattctaattaaagtggaacattgtgccctcgctaatcattaatgggttttcattttgtaaatgacatttgcagaagttaaaacagcgagttcatgtgaagtccacaggcaacggtgttgaaattagcatcaccatagcaacagtcttccatcattagcattcagggcaacaggaggtgttttgttgtgttttgtttcccaaaaaaagaaaaagaaaaaaacttcaaaggtaaagcctacagaaactctctcagaagatatttatgttccttgtgtgtatgtgtactgtactagacctctaagtctacatagaattttttttaaaaattgcaatgtggatcatctcctttccagatttgtgttttgcctagtatactagctaaatttcatgatctttctccagctgtacacgtctgacctgctgagcagcatttactcattgccaacctgctgctcaccaatagggtttcctacgtggatgaagagagtctgtattcatgaaaatatttggttcaatctaaaagtattatgtgtattcatgagtttttaatttaattcatggaaaatagatttatgctgttagatcctctggtgaactcatttagtcatgttgtagatataggtcaatgattattctcattcatgtttagacggaattaaagaggagtcaaatagagaacaatattatcttaactgagtctctggcagtggtattaccactattactctgtatgtgtgtgtgtgtatgtgtgtgtgtgtgtgtgtgtatgtgtgtgtgtgtgtgtgtttgaattctaatattctgggaaactttaaaagtggcatatctagcacttatgtttttctcagtactaaaatgcataaaagagcaccatattgacctaccagctgcttctaaatcacaccagtagtaggtaattatgaaattcaaatgaagtttaattttcatttattatacaaaaatgtcatagctcaaacccagaagtgttacccccaagcttggatatagacaggtatgtgtgtacattttacttttcaagatgaatcatagcagtcttctccattacatgtaaggactagaagttgtacattccactcaggtacctaaaggcaagcctgtgctagcccacactaacaaagcaaaatgaagcaaaggatctatctggctttcaatcagggatgcatctatgctatcatcagctctgtcacataataaatgagtctatagataacttgaactactcagccaatgggctgtaacccagtgattctgtggtattgaaaggcagcaacccccagaagccacatgtctcagtgtgcactccaggactgtaggcccatagaacttgtatgtatgcacacatgcatatgcattccccacttttctaatggcgatccaatctaggcctaatccacagctagtccagaaaagaacttttttaggttttctgtctgccatcactttgttgagaggcagtacaagccaagcaggtgtctgtatttataatatgcacaatgttaggataactcaaactcataagggaaagattaatggctgactactatgaaaaccgcttctagccttgtgataccagcacctactatcttcctttttctcttatatgatgaaaagatttcaatgttggcttttcattctgatagaatgtgcaagccaaaatctaaataaagtccagtggcaatgatccccttaaacattatatctttcttctcgatatgctgatgttttcccttataaaaatctatgtaagtttcaagatttatatgacagacaaaccacacaaacaggaggtccctcacattcactactagtcacttgctctatcactctgggaatagcggtcttcagattgcatctctactctacctcttgctcttttcaacccctctcctcttttttagaccatacagggcatcagacaaggtttagtttaccactaaactttgggatttggaagatggtgtataaactgatacaggtagtccactcacagatgtagtatataattacagacttgagttttcaggggctcttctccagtttcctgtcaatcaatttccctggctgagacattagcatttgtcagtgaccatgcttactatatacatacacaattgtgtatacacaattgtaaaattaaatacgggctttagaagagattattttttcttaagagtaggttactctataaatgccaaagcatgtgttatgacatagaaattcaaatgactaagaatagctaattgtttagaaacatcttacttgatgtctattgttccaaaatttgatccaatttagagtggtaccaatccatggtgtagaatataaaagctaaaggataacaaaaatcctaggaatctcatgccagtaagaaagttctaccagtcagatgagatgttgagagcatttatgacttggcatcaggaatattataagtaaaattcatgtgagcagtaattgcagctatgaaccatgttatttgttcccacttgtccaactgtaattctttcacttagctcagagtagttctttgtaacattagggcccactcatctgcctttaggtagggttttaaaagatgcctagaaaatagttctgtgctagaaatcagagactcttgacctactgtaaagggagcagtaagcacgtttcctcaggagaatctttctacatactgcagattcccataaaaatctttgtgacaaaattgcctttactgaaaccatcatccattggattaaaaaatagcttaccattagctttttgaaaatagaaaacgttgagccttttcaatgatactttcaatagtttttcacaactatgagtcctcaagctatcagtcttatttttagataccatacttataagatagttatagaatttatagagtatggtttaaaagactattcaattatagagcaatcattcagtttattcccatggcagaagtaaatggaaaccactccagatcaacaagaatctactctcttctgattcagaaaagagatttcctatcttttcatgaataatccatgttcaatgtttaacacctcaggaagattttcttaatagcttcttctggtcataaatccttggtctgtcatcagggacatattgaagagttagttaccaaagttcttaatgtctcccattgtaaaaaaaaaaaaaaaaaaaagtcactttttggattgtttctttcatagagtccatgcttctgtacgcttaatactttagcttttgacttcaagctttaggtaatgcaaatgaagctattacatcaccaaagttaaatttttcttgtaagtatattctcaacattcacaattgagagctgcctcttctttggctggtataaggttttaatttattgtagcactttcaccctagaatggcaaaaaatgttgaaatcaattccatatatcaccaatacaaagtactaagtcaaggccgggtgtggtggctacgcctgtaatgcaagcactttgggaggccaaggcgggcagatcacttgatgtcaggagttcgagaccagcctgaccaacatggtgaaaccccatctctactaaaaatacaaacattagccaggcgttcatagcgagcgcttgtaatcccagctacttgggaggctgaggcaggagaatcgcttggacttgggaggtggaggttgcagtgagccaagatcatgccattgcactctagcctgggtgacagagcgagtctcaacaaacaaacaaacaaaaatattgaattgtacaccttaaatgggcgaatcgtatggtatgtatactaaatgtcaataaagctgttatatgaaaaaaaaatgctaacacacacattctgaaagtatattaaaagcaaacctacggccgggcgcggtggctcacacctgtaatcccagcactttgtgaggccgaggtgggcggatcacaaggtcgggagatcgagatcatcctggctaacacggtgaaacccagtctctactaaaaatacaaaaaattagccaggtgtggtggtggacgcctgtagtcccagatactcgggaggctgaggcaggagaatggcgtgaacccggggctggagcttgcagtgagccgagatcgcgctactgcactacagcctgggcaacagagtgagactccatctcaaaagaaaaaataaaaataaaaaagcaaacctacaatgtctcttacaaacacaggcaactattcaattccgagtttacactactgaaacacacatgaatatgacactaagagaatcacgtggatctgcactcttcaatcaacactacgtctctgagcacaagaattttacatctgatttccatttggggaaatagattcagaatgccataaaccagatacttcttgccttcctttagtggtcatttctgccattatcatttaagggaatggatctccttctcccaaaactgttaccctaagattacaagcttgtcctttaacttatctctgaaagcacacctctataacgggtcatcagtattcagtcagctaattagactgcagaagtacgtttactcaaatgtgaggagataaaattgtgaaatgtaagaggaagaaagaatgtcaaagataatccaacccaaactcttcatcttacagataggaaaatggaagtccaaaaggggaaagtaattttagtaacatggctaaactggtctagaaaaccagatcttctgatacctgatcccatggtctttctaatgccatggatgttcgggtagaggatatattcaggtagataacttatagatagccccatgtgtttgtatagcactttatcgaacactttcacctctattatcacacttgattcttacaatatcccatggaatgtttgagtatcatatatgattattcttattcccacagacttggaaactgaggctttgagatgtctggatctatcttagatcatttgctatggactagaatctgggactaagttgcttttgtctaagctgtgtgtttgttctgttgtgccgtattgttaattcatttctgttggtaaacaacacaaaggaaaaacttctataattatgtttctttttcatcctcaggtcatctatcctactttttatctaagctttggaaaatattatgtgctttccttttttttgtattttcttttcgtagagatggcagcagggggtagtctcaccatgttgcccaggctgacctcgaactccttggctcaagcgatcctcctgccttggcatcccaaagtgctgggattacaggcgtgagccaccacacctggcctattatgtcctttctttagcttgctcgtttaaccatttgtttggcagggggagtcagaactgtgttttacttagtcgattaactgataggacaatttaatatctaccctgcactggcagtaacccccatagccccgctctgtgtctcattctgtgccctgaacaaccttgtcttaaaaacattttaaaagcagcaagtatggggagatttcttatctccatataatacagaagcaagtgtagagtatggctacggaaaacaaccagcaggtgaggctgtgacataacaattttaacccaagcctcactgccacattgaggtatccttgttcaataaatagatcagaaaatatggtgtagtttttccctaacgctgtctaaacagcaacaacaaaaaatcattacccatagtatttcagtaatgtgttgtattgaatgcattgttttcgagggcgttttcaaaaaataagttgattgaatctcttttttttgcttgaagaatgacccacattcagaaagtatacagatgaaacatgttcagctcaatgcaattatcacaaaatgaatacacctatgttcgccatctaggacagtaaataaaacattatcagtagccctaaaccagattacacacacacacacacacacacacacacacacacacacacactaaaccagactacacacacacacacacacacacacacacaccgggttgggggagtggtgagagagagagagagaaagcgaatattatgttaacagttggggagtctaagtgaatggtttatgggtgttcttttaacatttcaattggtttaaaattttcaaaatgaaaagcttgaggagaaacatagaatataaccactacctcagaaatcaccaccctacctcacccacattccctctcccaatcactattcctccctcatcttaaaggtaactgctactctgccttataacactatggttgagttttgcctgtttatttgaactctataaaaatggaattgtacagtatataaccttttgtatctaggactcaacattgtgtttatgagattaactcatgttgttgcatgaatctgtcatacattttcattgcaatttgatatcccatttaaaatgtatactataatttatccattctattgttggggaacattttggttctttccagtttgaagacattatgaataaggcctcctatgaacattctttaatgcgttttttggcacacacgtgtgtacaactgtgtttggtatatactttgcagtaaaattgcctatgttgagggtaggcatatgctgagctttagtagatactcctggttttccaaagtggttgtaccagtttacaccatcattagcagtatatgaaagttctagtagctccacatctcaacaatacttgatacttgttagtctttaaaattttcgccattgcagtgagtgtgtgagtagaatctcattgttattttaatttgcaattgtctgattacttatgaggttgaatatttttacgtgtatttattgaccattttggatatcctgttgtgtgaagtatctattcagtctcttgcctattttttttattgattcatccttctttttcttattgatctgtaggagttttttttacatattctagtttgtagccctttgtaaattgtatgtgttgcaaatatcttctcccattttatagctttccttttaattaaattgtttttttgattgatagttcttaactttaatatagtccaatatgtaaatttttccttagggttaattcttttgtgtcctctttaagaaatctttcctaatacaagataatgaatgtatcctcttttattatcttctagaaacttactattttttaacttttccatttagatatatagtacacctggaattgaccttttgtgtaatatgtgagatagagattgagttttatttttcataatatggatatctagttggcccagtacttgatgctaaacattcatttagaattcatttgatagtatttcctttagagttattgcatctgtgtttattagttatattggtctgccattcttgtcaaggtttggtatgtggattattctggtttcataaaggcaagtagggaagcattgcctcttctagtctctggaagagtttctttaagattggtatttctgccagtgatatgatttggccttggaattttcctagtgggaaaatttataattacagtgtttatttcttaaatagtacagggctattccaattttctatttcttcttttgtcagtgtcagttgacttaaagcacactaagatactctaagattgctatggtcagcctttgctggtctaaaccagaggttgcaaactgaaatgccaacagaggggctagcctgctactgtaactgggcaaggctagcgaagcgtaagttaatgggagctggtagggactatagaatacatgtgccgttatagaatggtggctccggaaagttattgtcatgcaagaataggagcccagcatggacaaatcattccttttaaatgagaagtcagaaggttggattattctgtaaaatatctctgaatatttaaatgttgagtaattcagattaaaaaaaaaaaaactgtgtgggctaatcaaaacatttgtgcatgccaaatttagcccaaagtctgctagtttgcaacttgtactttcaactaatgaaaagcgtaatagcacagatataattccattttcaaataatataattcatttatagttgacatttatttaatttacacttaaatatgaatttgtcatttaatttaccatattaaaaaagtttagattttaagacatccaagtctgcaaataactagaatattttcatttactctcatgtttgtgtacttatttttccttaaatgttattttcatgatatacttagtgtcttgtggacattccaaaaaactgatttgacttaaattgtcctcactccaagctttaaaattgcttagttcatagcctaccttgcctaaagcaaacctggtagtctcatttcaagttactggattttttgtttgtttgtttgtttgcttttgccttgtttcttttcaaggttatatagagtgaaggaatatcagacttcttttaatttttgcagggaattcagattgctgtggattaagatcctatatataagatgcttaggatagaggcatcatgaatgaaaaattattcatatgaacacactttttagagtattatttttattcattcagcaaataatcatagctgccatactaggcaggtagggaccatgaagactactgtccttgtagtctaaagtcttgtagactaataagatatgtataactgttaaatagtacactgaaaatacaaccttaaacaatcaaaatatttgcaaattgtatttagttgacatgattgcataattgtatttatgtgacaattatatttgttattcacatatttagggagtcaatatgtacttaaggtaatctttgagctattttcaggatgaggtattagctcattactattaatactaccatcaccaaatgcattacctacttatctgcatttccaggaaaaattcaggaaattaggatttttaaaataataaaataatagtaaataagactgggcatggtggctcatgcctgtagtcctagcactttgggaggccgaggcgggtagattgcttgatgccaggagttcaagaccagcctggccaacatggctaaaccccatctctactaaaaatataaaaatcagccaggcatggtggcgtgcacctgtaatcccagctactcgggaggctgaggcatgagaattgcttgaacccaggaggcggaggttgcagtgagcagagatcatgccactgcactccagcctgggcgacagagtgagactctgtctcaaataataataataataataataataataataataataaacagaataataacctaagtgactatatttgatatatagttaagtgatgtttttgtagactttactaaactaaaaaataaattagcagttatttaattttctagtttataaagtacctacttacataaagttgcatatattacttcatttaattttaaaagaatatcgtaaaatatgtaggatagatttccattttatagtcaacaatacttattatttcaatacattatgtgattttttttcccccagtatcacagtgttagagcccaggttcaaaccagcattttctaactgtaagtctggaagtctgtctgcttactctatgtaagatgccttatgaagttcatagaggagacagctcagtggattcaggcctggtcttatattttgctgttcatcttgttttaagtgttatgttaagcaaataaaacataactttaaacattctgtttacttttaaaatttgatttagagctaacaaaaattagaatttgtactccatttacaacgaacagaacaaccaaataagcaaaattgtatttgcgttgtcaattacaataaataattataatggtatatcagagtgttaaattttgatttttttttttttgagatggattttattttattttttattttttttttttttgctctgtcacccaggctggagtgcagtggactgcaacctccacctgctgggttcaagtgattctcccgcctcagcctctcgagtggctgggattacaggcacccgccatcatgcccagctaatttttgtatttttatagagatagagtttcaccatgttggccaggttggtctcaaactcctggccttagatgatccacccgcctcgacctcccaacgtgccaggattacagatgtgagccgccacacctagactaaaattttatgttcttatatttctttaaggaaagcaaaaatgttgacagagagggttaatactagttatatatacaaaaaacctaaaaataagattttggattattctattatatgattattcatttattgaaaatcataaactaattgaatgactgagagcagcactaatgtgattactttggtaggaatctgtcctccaaagttgtcagttgtcagttattcttagcattttgaactgaagtctatgtaattaagtcacctgttgtttctgacaaaatgagcaaacacacataaaatctcttggttcgtcttcatgtctctgtggcagagaactgaccacattattcagttcctttgtcctttttagacaaaagccacctctacatggccctataagtcttcaattcaaggactatagccgttatcttaatgggattgtacttggttatctgataaattgtcgggaacatacccacattgcttcctttacctgacataaaatttagtcagctggggctcaacgattgaccagctttatcttgcacgtagtgaagggaaggactttcttactcctggatgtgcctaaatttaagcctttgaaaaagattgaagataccaattggcctacctgccctaagtagatgcttcccacagacttaactggtgaagtgcttgtctaaggtagacagaattttttctttagagaggagcaaacaaaaacccaaaaatactggcgtgttcttttgatgttctatttcccaattgatttccgggttcacactactccacaacatcttactgtcccattgcatcttaaccctctctcctctcccgcccccactttttttttgtctgtttcttctgcttccaccgttgcttctgctctgaagcaatcattttctctcccttcaaccaagggtggaattggcacacagtcaattggcttgggagactgcttactgatctgtcttttttgaacactggaatcttgacactggttatcattttgaggacagcctggtttggatatttatctattaagaggaatccttaattggtgtctttgactggagtatttgaaggagtctttaattgggaggttttaaggcaccagaaaagattcattaggaatgactgacctcatgttatataaatgagaaatatttaccatttgctgtacacgtaattgaagcatgattatacataaaagcatataattaaaaaatgtaaataaatacctaaataaataaatgcctataactagcatggcaaaggattctgatatcagctttcaatctcttttagtagagactggacaaatcagaaaaagaggatttatacctgtcctcctatagattatgctttcttctcccatcatccagttttaattgaatctcctcattgtgctttctttcaatcttgagctgcacaagttgttttctcctgtcagagcttttaatacacattgacaagaattattagtctctatctgcagttgttccaagtgcaggtttgaaataaggagtcgtcatcaatgtgctaacgcgtgctacttttggtatttatacaaagtgcctgctgccagttacttgccacttagaatgtgtttttcttttcctctcttgcgttgtgggagtagaaggattctctgtttcttttggcagacagagaaattttcagattggggtctaatgaaagaaataggttccattatacagatgtacagatgttctaaggtcacgatacctcctataatattcttatgtgaaacctcctctttatgttcaacctgtgtacgttacacttatacatagcaggcatagtagccatcaatattagttactttaaaacccaggcctcctaggctgtggtttgtactaaaacatcatattcaaataaaagcattccaatacaaagtggagaaacagggacaggcatggtggcttaagcctgtaatcccaacaggctttgggaggccgaggagggcagatcgcttaatcccaggaggtttagaccagcctggccaacatggcgaaacctgtctctactaaaaatacaaaacttagccgggcatggcggcacatgcctgtaatcccagctgtaatcccaggctgagttatgagaatcacttgaacatgggaggcggaggttgcagtgagccgagatcacgccgctgcactccagctttggtaagcctcggtaacagagtgagactctgtctcaaaaaaaagaaagaaaaaacgtgtagaaagaaagagaggatctgattaagctcacaggaacattgcttctcaaattttaatgtgcatacaaattgtctgggaatcttgttaaaatccagattatgagccagtgggtctaaaatgagacatgatgttctgcatttctaacaggtgatgctaatgctgctaatctgtggaccaaccacactttgagaaggaaggaagtagactattatatttactcattcacttgttccatgataactcttaaaacagactggtgactttaatacaattcagagcaccaaataaagattgtcatatgccttatttttaacctatcgtcttatatcaaaattatctgataaacttcccaagtgtgcatatatattgtcattttaaataggtttcaataaaatgaagattcgtgagtaagaatataggaataaatgacattaaaatctttctttataatttatatttctactttcttttgaaagaatttgtagtggcttaaacataagagcacaagatgagccagtgacaggaaaaaccaagtgcatctgacatcttagcttattaggtctagaagacaacctccattacttggtagcaagcggctgggaatattggtgttcaaagctgtgctttcctgaaggcaaaaacagcatcaaaatatgaaaagctttttacttctggcatgagtgataaagatgccgatctgagaagcaggtgaaaaaacttagcttatgcttctaaaggctaattttatataagtgttcttgtccagctgttcttggtaagtccagctgctagttgaacaggacaggtggtaatccctgttcagtggctcattatcacccagaggctttgatctggctaatacataatcaatcagcttctgaatattaatattcttcctattttcatttcacttgttttacctaaatttattttccaaagttccagtatgtttttgttttttaataagatttttgatcatttatttattttgacataactaggctcatgatatgccagctggagtttattacacccctgaatcacaaactttttttcttccctctttatctccttacaagatccaaattgcaaaacctaaggataaagttctaattttggaagcacaaaagactgaaactattttagaggagagcgttaatgaaaatcaatatctaaaatcctcattttaagactgtgaaccctatagtctatacttctagtgtcttcagagttgtgatatgcatacattaaggactaagaaacatttttttaaatagtcagatttgggagcattagatatgtttgtagagggaaaaatcaatttatgataaaaattactgacaatggtttaatttgtattagttttgcccacttccctgttatctcagaatggcacctccatggacagtggaatggtcctaacagcctaaatatggtaagctttaaaaacagatggcttggggccattctgcttattatatcattgctttcaatagcataactgttcttctccaatggccctctttgttgtttgcttcattactggcacatttctttaatatgtaatctataacattaacatgaaaatggctctcaaatactattactttctccatctgtgacccagtactgtttatcatcatctaatgatcattcttattgcagatggccctctttaaatgtttcagaatagcattttaaagacattgagggtgcttcctacgtacattggcagactgaatgttttaatatcgaaaatctcggtctacacgatgtgtgataaatgactggagatgcaaggcaccagtcagttccaaagcaaggtgtaagagggacaggaggagagtgataaaaaagaatacatactttgcgtgtgtgggtgtgggtgtgtgtgtgtgtgtgtgtgtgtgtgtgtgtgtgtgtttaagccattagatttatctttaaggaagcattatctttaaggaaagttggagtaggaagaacaaaatttaatcaaaagaaacagttcttggccagaggaggtggctaatgccggttatccgaacactttgggaggctgaggtgggagcattgcttgaggccagcagttcaagacctgcctagtcaaggtagcgagacaccccacctctgccaaaaaaaagaagaagaagaagaagaagaagaagaagaagaagaagaagaagaagaaacagttcgttattgcagttcttaaagaaggagtttgtgtttcctttctgatcattcaccatggcagtgatacaaaggagtgatatcaaattgataaatgagttccctaaggctcaacatatactaaatgcctatgctgaacttccaggtttcaagtccctagagcctctctgtctgaagatcctatcaccaaggattctttgtcttcatctagtactttctttctcctctctctattctttcctcatttgcggatgcttgctggggcctgtcaatcaaacatagatgatccctgacttacaatggttggatttaggatttttttacttgataatgctgcaaaagtgatacacattcagtagaaaccatacttcaggtatccacacaacccctctgtttttcactttcagtacagtattcaataaattacatgagctattcaatgctttagtataaaataggctttgtgttagatgattttgcccaactgtaggctaacgtaagtgttctgagtaagtttaaggtaggctaggctgagctatgatgttgagtagattaggtatgttaaatgcatttttgacttagaatattttcaacttatgatgagtttattggtacataacctcattgtaagttgaagagcatctgtatctgggttggagcagaagtattgctagtaatgcatccatgagtcaactgtttgcttaattggtatgctaccacacatgtcttgagcttgttcatcccatggcttgccattgtgttggaaaggaaggtgttacagcattgccgttaataacatttctaaatgggaccaaaaacagtattttctttatctgctagatctttttattttcttctttctctgtatacgtgagctgttcccaaaatttagcacacatgttttatgattctcaacataacgtttatggtccttaacattaatctcatattagaaaataaatcatgatgaaggtgaaatatagaccaagcaggggcagttatgaggaccaaatcgtcagtataaaacttttataattaatattttcatgaattgatagcacttgcttcagagagctaaactcagaaaaaagagaaatattctaacctgaaaatatatttttaaaaactcataatttaaggtagggggcaagtagatttggccatattttgggctttcttcaccaattcagacacgataatgactacatttgtatcctagatttaaatttgctagatggaaaagaaacacataaatataaaccccatctgcgcaaacaaacataaccattcacattcttatgcaggattctggggtaggggagggctttttttgtattataacatagcatgttaatttttaagataaaatggaaatatttttgtgcttttgttaatttttatgttaaaaatgacattttaggcacctaatcaaattctctgagttctttcactaaagaattttgcctaatatttgattaaattcattattattaaagatcaatggaatttctttcagtttgaaaagttgaaaaaatgagttgacacattgattcatagaaaaagttatgaaatttgagaaaaattattgaaccaattttatttaaaatacatatagatattatgtgtatctgccttcattttcaggataatgaatgtcagtgttaaatgtggaaacattctaaaattggaaatcagactccacttggttcaaagaacaccttattttagataagccttttaaaataatgattgaaatccagtcaatccataccctcacacataatcctcatgcatgatctttgtttttccctatctctcctctaaatgtcctttacaaagatgagaaatgttcttcccaacacaaaattcctttgattgtatattagaaagaactgacactttgcagcaaggtttaggaaaagctaacgtaagtagagcttctctgaaaactgttttaccaaaacatactggatttactgctgttaaataatggatttttttttttttactatttatatttgctcctcattgaaacttgtaaatgactttattagtcttaggcaacacatttcattttgcattggataaagatgcttcttcagtaaagtgttcatttatagcattgagaatcttgaaatataaccggtgtcatcaaagggtaggaaggtagaggcacagagaagtgattaatcacttttccctccaatgaatgatctactgtcaagttcaataatcatatttcatctataaagagcactttgagcaaagcctgttttgcacacgtcattacatttgattacaattaagtataaatatatgcctattatttagctctagttaaaatctgcaaaaatatagaaggcttgtgggtgatgtaaattggagatttgcataggtttagggtacaatattagaaaacactgtagttttatttttgctttatgactaaaaggcactagctatgttatctcgtttgttcaccaaactaaaaaacaacagctaaaaagcaatgtaacaaatttcctctaaccttcttaacccatccactgctgtcgcatgactctcacaaatcagaaataaagaaccatttctctactgaaggtcatcaactcatttgagggccatagatcagtaaaaaataacttagtctgagacattcaaatcacttgctttttaggtaaatattttggcttttaaaatgacacaaatctgaccaaaatgttactcagctttatgggaacgggattcttttctagataatcttagggacgatcttaactcatattgtttttgttcagagactaggtctaatttgttagaagtgctgccatgggatctcattctactcaacaggagtgcattcttcttatccagtatccactaaaagtcactcctcctcccatgaaaagagttgccagtggaaaactcagagaaaacatgggaagggattggtgatgtcatataaggagattagaaaacatttttttaacgtttaaaaagtaaagagatgaattttaaaatttacaaaccaataagtttgatgttgatgagcaacaaaatcctggaaaatgacatcgtactgattattaatgattacataggataacatgctgctgggaatcagcgtgatactctcaaaatctgccatgtcacatgcacctcattttcattttttttatggctgcttgatggttagatgagaagactgttagagacagcataacttaggattttacaccacatttttcaagttctcttttgagaatattgggtacaagataaagaacagtggggctggctaataggctgaatttgaagctgattaaataatgacatctaaagaatgtcaattaatagatctagatcaacacaaaatagagtctctgtcgttggccctgcctttgcacatggctgtttcttcttcagtcatctcttaagctcaactcagccctctgcctgaagacctcatttggccagttttgcccattcattactactgtgaactctcttttgttatttttttcctgttttattctgagaatggattgagctagatatgtggaagttatgggaaagcatattttaactaaatattaaagaaacttttgtaatcgagctctccaaaaaataaaatccgccactttgaaaagcattaaactccctgtacagtagattttcaagactgaaatgactgtctcacccctaaaggcaatttctgtattggatgagaggatataattcattaacctttaaggtcacttgtgaatctaatgttttgatattttcggaattaatcagaagggaactgacagcatgacctgaatctgtcctatatttatgtaaacatcctgtgtgatgcacctcattctttgtgcagttgtatgcatttttgaatgttaaatttgattttagggcaaacgcttttttaaaaaaattttaaaataaactttattaaataaaaatttacacacagtaaactgcctccatttaaagtggttcagcgatttttggcagatgtgtacttgtgaaaccaccactgcagtcaaatgacagaacgttcttactcccccaaaagcctccttgtgcccctttgcaggtcatttttcctttcacccctgattctaggcaaccactgatcgtctttctctcactgtgtattactttgcattttcaagaattttctataaatagaatcatacagtatttttgtatgtatctggtctcttatattcagcataatgattttgtttccagcttgaggatattatgaataagactgctaaaaattgtatacttgtttttctaaataccccttataaaatcttacttttgagaagcatattactaaaataacttcccaggttatatgtgtatttgttctttctgttcatttcagcattatcttattaacaagcaactggaggacatgcaccaaggataaattgactaggtgctaactgaatttgtgagaaaggcctagtttctaacgttctttcttgggagcagatgtgtaacagctacttttgctgtataacagaccaaccccaaaacttactggcttaacactgaggtcagcaaacattttctgtaaaggacaacatagtaaacactataggctttgtggagcactttgcatctttgttgcacattctttttctttttacaactctaaaaatgtagtcatacttagctgagaggctgtacagaagcaggccatagaccaaatttgaacaatagttcataaactctataacacaatggccagccatttacttagctcactatttgatgggtggattgggccatttatgtggtgtgaccagttgtactactgtttgccaggcatgcttatgcatctgtagtcagctggcagctggataagctatcgtgacctgactcatatgtctgatggttgacaggctgtcatctaggaacagatgcaactaggtttgtgtgtatctcatcatccaacatgctagttcaggctagttcacatggaaacttctcaggtttctgcttgtgtcatgtttggtagtgtccattagccgaagcaagtcatgtcatagggccatcccagatgtaaggagtggggaaagactccacctgttggtgggaagagatacaaaggcacactgcaagagctggacaccaaggagagggctagaacttttggccatgttgcaagatatcacaaaatattcaagaaaagttacaggaaggttcctctgtggactaaattctcttctgaatttagatgtaggtaaaatggagtgtgctgttaaaattcatgctttgtgagtaatcattgctaggctaaactgtttgtggcttcacagccaatggtagacatacagcatccataatctagtgcttttaaaaatataagaaatactgattacaaacatagttaaccacttattagtactgggaatttaatgaaagctgctgtgattaaatactgaaaaaagaaagattgtgggtttccttctggtaactttcaaagctggtcactcttttgaaaggaattttattcttaaagctgttatttttactcataatatgcttaatacccccatggctgcagactgtctaaaatgttcctacaattatatgagaatacttttaaaaatcatgataattatcagtcttcatggacacttattcagattaatttccccaagcacttaataggatgaatttataagcattaaatagaatggggaccatccagccctaaaatgtgaccattctgtcaggcacacacttgccaatttgttggcgtggacctgagcacactagcaaggactttgaattaggtctcactgcaagatggaagcagaagggcatttctcagtttatgttttgaagtgttttgttcagacaggcaacgtgcagttgtgtatagtagtgtgagctacctgttactccccttaacaatacttttagcagcaatgtttttcctcctgcaatgtgacaatatcaccatgccatttggaagaaaacaaaaaggctgagtgattcctggtatactcccaaacagccacccaaacgaacagctggcagagaagacaccccctaaaacttggagcagattctcagcccctgcagcatctcatgtggttagaacttcagacttgatgaacgcctccccaacttgctccccctcctgaatcttttaatcctcctccagtctcttgtaatgttccagcccttaccagggaataagactgcaaactgtcttccgtcaacttctttccaaatcctagtctagagaaattataatgatgcatgattgtccagtgggcatgtatagtttgtccatttctttatgtagtaaagcctgtagctttcatcttttttgccaatccactataaaaattaattttatatgtcatcctggtacacacacacacgcacacacgcatctatatctgtaaatctttttctgtctattcatgcttgtatgattgaaagaaaagtttcacaaaacattacttacccataccaaatagtacactttcatattttttttttttttttaatttcaacttctattttagatacaggaggtacatgtacaggtttgttacatgggaacattgcatgatgctaaggtgtggggctcatgacctgttacccagattgtgagcatagtacccaataggtagttttataacccattttccccactccaacctctacactgtcatattttctattcttttctgtttcattaagaacaatactggtaatgatccactatatagatttcatgacgtactaagggttcatgacctgcagtttgaaaaacactgtagttagttttatctccacctcaggccaggtcatcagaaagctgcattcttagaccactttgccttggcccccataagattgcctcaactcaggtgtacctcggcatcatgttcctggcttatgtcgaggggcactgaaaactgctgaagggatttttctgaaagtcgacaccatgcagtgtctcccaccttagatcccatgcagatctgtttattcaatctaagtcattccagacttggattttcctttgtttcacttacactctttcctccttatcaataatccaaataataaaatcgatcatatttccttttatattttttcttttgctttgacatctacaaaggccacaaccaaattatacccaccttttaaaacacttttttactgaaatatattaggcatgtagaaaataagggagatgctggttaaaggatatgaaacttcggttaggaggaataagttcaagagctctattgtacaccatggtgactataggtaatgaaaatctagtatagtcttgaaaattgctaagagagtagatttaagtattatcaccataagaaatgataagtatatgaggtaatgcatatgttacttagcttggtttagccattccacagtgtatacatatttcaaaacatgttatacatgataaagatatacaatttttatttgtcaattaaaaaaaaagaaaaaatggcttaaacttatacagttcagtgaattttcacaatctgaacacactcatttaaccagcatccaaataaagaaacagaacattaccaacctttagaaggccctttgtgtgcccttctgatagttacctgtcctccaagggtaaccacaatcttgattttgaacaccattaaatattctggcctgttcttgtcctttatataaatgaaattgcacagcatgtactcttttgtgtctgacttctttaaacctggattcatccatgctgttgtatgaagtggtggattgttcattctaattgctatgtaatatcccattgtgtcaatatcctgcagtatattatatactctactgtggatgggcatttggtagaaaaaaatgatgttataaacattctaagacatgccatttgatgaatatatgtatgcattcctttgaggactatatcaaggggtagaatttctgggttatagggtctgtgtgtgttcagcttctgtacattcttccaaacagttttccaatgtggttgtaccagtttgcactcctactaacagagcatgagagttgtagttgctccacatcctttctaaccctgtgttgtttgtcttgctcattctggtgggtatgcatagcaaaattttcataaccacatcatgcactgtgatcttcaaagctgtgttctggctgggcatggtggctcacacctgtaatccctacactttgggaggccaaggtgggctgatcactagaggtcaggagttcgacaccagcccggccaacatggtgaaaccccgtctctaccaaaaatacaaaaaaattagccgggcgtggtggcaggcacctgtaatcccagctacttgggaggctgaggcacgagaattgcttgaagctgggaggcagagtttgcagtgagccgagatcgtgccactgctctccgacctgggtgacagagtgagactccgtctcaaaacaaaaaacaaaaaacaaatctgtgttctaaattttcctcgcttcttaaagttttatgctatttatatttccttagtgctgggttttattaatttttaagagttatacattgttataagttgccctaaagcctttacagaacaatgcacagtataaatatgtacatagtatatacacaaatatgaatccatgaatgcacagctaatagggccattatcaaaaatcctacacttttccttttcctctagccctcacattcaattggctcaaaagtagcattgattttattctataacctgtcatgaattcagcctctccacaaattcccagtgctcctttcttagttcagactttcatccactcttaactgggctgttgtcatcatctacttggcatacatttccattctgatccctaccctcttttccacccttgtttcttcccacctcaaatttaattctattttaaaaagaaagatattcaaaagtacaggtggtgccaattttttcttctctatccatcatatgcaaagaggcttccaattctttgtcgacctgtttctaagggatgagagtaggtcaagctgtgaggacttcaattcccacgtgaaggtcttgttcatattaactcaataatgtgctttgatgtcctaatggggaaagtagtattttctgccagttagccttcccaagatatcaaatccaatattggccaaatacatttttgaattcctaaaaagcctaaactgatgtcgtaacacagctgtatattaacataaaaactctgtaccttagtaaattattaatatgagcgattagctcacagagtcaatgtaagaaacttgtttcaactcttcatattctagcaaaaagaacacacacacacacacacacacacacacacacacacacacacaaaacctgatttaagaactaactaggtgattaaagcctacttagtttttaattgaagtgcatattctctaatcccaagaggccaaactaatcacctttccctttttgctgctttttttctctctatttctgtaattattataatctgtctgatactgtgtttagctatatatgggtctatcttctctcattagatcataagctccttaaggaaaaggccatatttccttgggatcccacttaaaaaaaaactggattacaatgttgaaatttttatatatttccatgtcattctccaaacactccccagtttttaccaaccataaagaaaaaatgagaagagtttaaatgataagcaaatacatatgtaagtgttccataaatacactatgtttgaagttatttaaagaacttaatataggataatatttaatagagaaacttagtctagatagagcacataaaaaacattcttggaaatttgtggataaataaaagttccttgcatctgtattttcctttcatcttgaaaacatgccttgacaaaagtaagccagagctggagtacaagattcagacattggtagatcattaattggttaaactggattttatcttatttccccttttatggatccctgtctttgtgtggaattcctgccacttgctggctgttcaaggcttgccaccaggagactttctccatcaagctaggggatatttctccctcactgtcccccaccaaatcaatattcacttgctctctgactactccaggtttctgctgtctgagaatatgaacatggatataccttttaacatgcgtgaatactattcatattttaatctcggccccactgaatgatagcaaacgctgtgaattttatgcctatctcaggctacagctagtgccttatcttgcacacacacaaaaaaaatcttacttttcctacttgcttccttcttaagtgtaaaaagcaaaaagaggaaaggtgccttttgtaaactgctaaagagcagtttacagaagagcagtttactaaactcagacctctcattttccctcacacgacaatctaaaacagaatgttaaagtgaatttatttggttctgtatacctaactattcctgaacatactgagttctcttttaagaaatcatacctgcctgacaggctgctttgcatgaacacagcattccccagccttcaaattgctgtcagagccgttgtgtcattttgacccacaatatggcagtattatccacattctatagatgagttaacaaaagcttccaagtggttaagtgacttgcctgtaaagggttaagtgacccacctctaaggggtagaattggtctggacactctgcccctctatcttcatgcctttgctataatacacagctacgcttgctgaagattaaggaagctgcttttgataaagcgtgattcttgtagatattcatctcaggaaaaaaaaaaagaaaaacgctggtgtcttcatctgtagcatttgattattacattttccttatctgtttcaacttaggatgacttccttgttcgcttaattgactggtaattcctttgtttacttttttccaaatctcaagaagcaagtctagagtattaacaatggttacattagcatttaaaatttttttttgaaatttgagtatttcagaaaggggtaatttaggcaggcatgtatgtagaactttgcattttaattaaaaagactcaaaatgaaatgaacctctgacagtaacagatgactacttctaaaagctgcattactacttgatatatgctcagtattttcttgtgggtaagtcctacgacttgtttcaagaaaagtgacaggactaaaacaattaaaaaagacaaagctgctgttttttaatcatatgttcataaataaaactaggttgtgaattgtttccagagaagcaattgacaaagtatgagtaaatcactctaagaactaaagctgcgttgattttttttaatgttcaaccaaacatctatccttgtccaatgatgaattttctttgacaaataaatatttacaaagtatgaaatatagactctgtgcctttcctaaggccaaagcatactgtttaaactaaaatttaattttttttctcacctcaaatacaccaaaataagaacataactaaaaattaattctctcttgtagtagactgtccattaatcttttgttagataatattagcattgtgagtgtcaggtagaaagaaaaactgtaatttctagattgatcagaaaatgtgagtatttatggatttgaagaaaacaataaagtctgataaaatagaattttctgtaacctcccttatggagtcaagaaggaggaatctttcaacatcctcccattttgcagtgaaaagtcttcatgcagtaaatagtttgcttgggtagatcaaagggttaatttacttctgatttgagaagagacgcagacttccctgatttttttacaaaaatgtgttgtgtgggaggaaggtagaggcctcagaatgaattcactaattggggttttcacctgctgtgagtctaatcgaatacaaagccttatttgtagctgaagaggaagagagattatgcagagtgtaagaatttctgcccagttttgaaattccgcttatttggcacaatcggtggggaaaggcagacaaatagttacaagtttgagctgttaaggtagaccaggaatgctgtagtcagatatacttgaaccacattaaccagtgatccatttttagcaggaggtggtgtgggtcatatacatgggttatcgctatagctggcaggctaataggtactccaaattctttcccatgaagcaaccgtcggcctgtgaggttaatgaagtatggctttattttagtgaagatgctaaaattcacatctttttagatgttcggcttgatataggtggctctgtgaagctttgagaaatcttattaaaagaaaactgtgtgagagtgaagcagagctcgactttatctggaacctgtctggtgaaatctctggtttagatggcagctggctcacagagaactttcctgagtctggcttactctgcctccctaaagagacagggcctggaaaaataggcttttgtgtgggtgtgaagtgctctgtgtctgaacttagaggcctcttcatttgctggttaatgtgacctggctggatattcttacatccagaagatgttggtttcagattgatctagggggattgttatatatatatttcaattagtatgctataatatttgccctaaccagcaatgattcaccatacaccaacccatttgttagatgtctgagtcactgttcatggttagtacttgtactatgcaaagaggaatatggaattcttatgtctttattgtatacccaaatgctgacattttactatagaatatgtattcgagttaattgaagtgatacctatactctaaatgaatttttataaagtgatgcaggttatactaaaacttagggcgcactatagatagagagaagctgaaccctaggagttggtgaagtctctcgggaccatccctccaggcaagtacccagttcaaaccattccttgtctttgtcctttcctatgccactctgcatttttacacagctagcatcaggccaacattgaaaccacatgcaacccagaaaggaaaaagatgtgtttgtggaaggtaggaacagcctagtttcagctgttggcccttcacagcctccactagatgggctcattcgaacccaagacccttccaacagtacactgcaaatccatagctccaattcagacatcttccctctgagctcaagactcagatgtccaactgtctcttggatacctgcacttttacatcaccacctccaattcattatgttcaagactggattcatcatctctttcctaaccctcttctgccccctcctcctgaaattcctagctcggagaatgctactcatccaatctttgttgtcactcaaggacaatggtccttaaccttcactgcatattagaatcacttggagagtcttagaaatcctaatgtccaagaccaattaaattagaatctcagggtggtgagacccaaacatctaaatttattaacaatccctgagtgattccaaagggcggccaagcttgaggactattgctttacttcttccctctcttccattcatacatccagtcagtcaagactcctgtagttggaaccttattgtatcatttctccacctcctctgccactgctgtaattcagatcctcctcatactgcaatctccttgtacctgatgtctgaatttcagactcttgtcttctgatcaagcccccataccattgcctgagtgatttttctaaaagacaaaccggacagagccacactcatgctttaattctttcttccttaaaaagctccctcatacctttcaggatacaagtcaaactccagattgtcacactaagccctttccagtttgcccatttctctaacccttatcttgacattctctccaaaagatcaagcagaccgttgaagctcttgtaaagaacaagctggttgcatcctttttaccctcacatctgctgttgtcaccatcataattgttgatatgcctttaccctcaaaaggccagaagctctttgtgggcctacagaggaggcttctctgaatatttatccaatgactgagtctcatctgctttttagccccagagtggggggatctgactttctcctctatcagtagtccccactcagcatcaagtctattgccccagagggtggctttggctggatgggtctcagtttggtcagggtcctgggagaaacagatggtacattcaaacggaacacttgaagagagtataatgaaaaggctatttacaaggctctaggcaggctaggagaaaaaaaaaaaaacaaggaatggtaaacttttgcccaaagggataaagggaggaatggtttgcgtaactggtggaatgctattgctgtaggaaaggactggccaacaagacttgtggctgcaggtcaaggaactcagcagctgccaggccagagatcagtaggagggaacctgaagaataaatacccaaacatcaccttcctcctgtcctttcctctccttctgtaggcctttcatcactgcctcccaattggctgaaagcaaaaggaagccaaacggcaggaaagcctgattgatgtccccacagaggtccaacctcctgggccacagagcagaatggagaaggacaaagaatagagatggatgggagaatggggaagcatcctgcacagtcccttaggtcagagatgcccttattctctaaagataccctcaaagtttaagtggttcaaagaccagagttttggctacgggaaaatgtactgggtcgccttctttgacctcatcccatttcatttcttctttatctctatttctagcaaatttactcttctctgctctgagccatcagtgagattgtctatgagtatactagaaaaaacacagacctttctcacaggaaaagaagccatgtctcttcatggcagcatagcagaatagctaagcgcatgagtcttcgagctggattccccaattccaatccttgcaccattctagacagtggtactgggaacaagtaggtcatggctgattctgaagtcaaaattttagctgaagtttgttctggtagcagagcttcaggctcttttcatgtccgtggttcatatcaaaacagtaataataataataataatataatcagaaggaggagaagaagaaacatctactataaacaaacaatatattatcatacatggcatcactacataatttacatatgacacgaaggtatatcaattatgttcttttccaaatgctttcctctaataagcaaaattcataatctgactgcaattgaacaacaaaacagtctctgtgatgcccgcgtcatttcttaatactttcagtatttaattataatatgacgtcaagatttgggaacaagtcttcaagtgcctataactccagtctaaaaaagaacttaaagatgtatttttgaggattgccatctgtcaatttttttaaaaagtctgaatagtgatttcttattccattcttttttcttgtcaacagattattcttagtagttttctaattggacactgagaaaagagacttaagcatttatagagaagcgtgtcagaactcctgaattttgagcaggtaatttaaaagtgtaaaacaaacaaacaaaaaacaggaaaggaagagagtgacaaatgtcttactatccaggtgttacaaatccttagtttatcgatttgtaatatttacaaatgtccatgctctgaggcttctgtcttttcgttgaaataaacataaacagtagttaagtgatttgccacactgacacagagattggtgtctctgatttactgcaaagggcactacttcctcattacaggacactaatccctcttccccaaggatcggagcagacctagaatatactattagaccaagggacaacttcagccaaagcaaatcttagtgtgcccccctcagaccgtaatagcagctgcctccacaactcactagcttaaaattgctaaagggcaacactaagtaatctcagtgtatgagccagaatgccagaagaagtgccatatttgcttaaaaatagcaataccgatcatacttacatgcacatatctttagtgataacatttacctttatatttggtttgttaaaggtaataaagaatcctggcattcccttttgcttttgtccagatactttatttttgcctcttttgccatgctatagcattagataaagcaaaacgggtgtgcttccacctaaaacattctagggggaaaaatgttgagcagaaaaggattatttcaaaagaagccggatatggtggcatgcacctgtcatcgcaggcacttggaggctgaagtgggaggattgcttgagcccaggagttgggagaccagcctgggcaacacagtgagacccccatcccttaagaaataaattttaaaaaggggaccacatttaaactgtagaccgaagtggaatgaatcaatcggaaaggagagtggaaagcaaatgtttgaaagaaaataaaaagaaaagcaagccaacaaaataaatggacaaagaagggcagtgaaaatatcactaacagtttatcgtaagatgctctttggatgctaatctaaggtgttatgtgaagtttgcagaaaattcttgtgctaatgaaggctttcttcttcttttgagtatttccaagcttgaaataattgtgtgtagttaacttctatcatcatactgcaaactctaaaattagaattatttgaactgttcaggccctgtaacttttccaataaaatattctattagaaacaagttccttctagatcttcctaaaagaatactaaaggaccaaaccgtgcaacagcactggtggtattgtcttaatttagagagtccataccagtgattctcaaacattagtatgctcagagtttctggttcaataggtctgggccgggcccagggaattttcatttctaagaagttcgcaggtgatactgataactgctgttcccagggtctacattttgagatccgctgctatgtcacaaatccaaatccaaagtctttttaacaatcccttttagcccaggatgagcctaacggcaatttcacgtccttatcgccggccactttaatcttcaactgaggaggaagggagagtgagaattatgtatataatttttttcttttattttttaaaaagaaaactccaagcccacactcttaattatctgggatgaggtcatttgcacctgggtcatttatttagacaacaagtagtcttgctagaggctttaaggaggtgttagcagagcggtgtgtggcttccaggttcctgggtctaccttaaatccccatcctctttctttctttctttctttctttctttctcttttctttttcctttccgttttgaaagccccaactgcccagtctctgggtgtccgggttcccaggtccctaggtgggggcggagcccgacacggccccgccccgtctgcccgcagcgccccctccccggcccgcccgcgccggctcctccgcagtgctttcagctgtgagcttgggcggcggcggcggcggcgctccactttcggggagcccggcggctctgggaagctcactcctccactcgtacccacactcgaccgcggagcccttgcagccatgagggaacagctcaaagggtaagtggatcgcggccccggccccgtctgatggccgcaatccgtgcacttgtggcgcgagcagggggcaagctgaggcggtcaaaacttggacaggcgcggcggctggacccggggcgccgggcggctgggcgtctaggaacctctcccgcgggttcccgcggcgcggctgcaggtgcgcccccggggtttctccccaggcgccgggctagtgggggaacctcttccctcggctttgggacgggctcggagagaaaaagctgatttctccccgtccccagaggggataacgcgttcctcacgcggggattggggccgggggagcttttcactcctttccaggctgccagtgtggacgtgagcaaggctggctgttcctaaatcgtcgctcttactcgtagaaggaaggggcgcacgcggcgctaccttccattgcactgcaagtgccaaaaggtcaactttctgcctgatttcttccgaggattccaactgacatttccctcgctgcattttctaccgtgctcattccatgccccaagacctgcagaaatcaggaaagaaagaacaaacaactaaagcccagaagtcaaagatttcagggggtggggatttttgtttgtttgggcttttttttttttttttttttttttgcccttcgggattgggtgtggagtcatttctagggtgttctctcgcatttctccaggtgtctgtgctcatcttcaagcaaagtttgtcactcccaatcccagcacggcaataaaaagggcagaacactttgcttatattagtcaaatttgaagttaagtttgaagctttaaattgaaggggtttagttgctcgagggaggcataatattaattataaactgtttttacatcatgaaaaaaatccatccgatttaagtggtgaacttttaagtggcgtctttaagtgaaatctacatttttccttgggcaataaactcttcttggtcttctgctttatccctgtcatctctccttgtcacccaccccccccccccccacacccccaatcaacctttctttttttgcctagcttttttattgccttttactcaagcccctctttggaggatacatttgctgttggagaagcgagtggagcaaatgaagcaacacggttatatgaaaggtctctgacccttgaacaccgtggaattggtttcagtcatcattgtttgatctccgattggacacgaccctgaaaagaaattgctttgaccaaagttgagggtgggtaggagttaaaccttgaaaagcaaataaaacggaggacaactaacagctggaacagccaccgaggcaatcatctttgccctggctttagccagacagaataaaatggtaaatatcccagggaacaagaaatggggaactagaatggatttctgatgcttatattgatgcccacccctccaaacccctgccccacggtagcagaaactttaaaatatattttaccatccacaccctgccagtattccagcaatgcaagccaagttcaacaattcagcacgcaaatgccaaggttcctctagaaaaagagtctgatcctcagattaaagggaaatcatttgtgtgtgtggatcaatgggctccagattatatatgaaaccaaactctaatcctctgcaaatcgcaagagaacgctccctttttatattgctgcatagcgattagttttctccctgggaagtagtggacagatagttttttaaaaaggcaactgtttggaatattttcagtaccaaataacaatggtggcagaagaaatcttattttaattaggcaactgccattttcccagccacagcagtagatatttgttactttttataagtgtttaatgtttgtttttaagaaactaaaaaagcaattccaataagtctgattattccagcactgacagcaggaacagctctgaggcagttataataaccttgcacactacttgaaactaaagcaggtgagagaaaatttaaattgtatggtaggaaattaggtcagccttgtgctcagtagagtaatgctttaatttcttattattgacaagtaggtgttgctggggtcttttgtcatagtcgatgactttatattttaatttgcatcagggtcctatcaccgcctcaaataaaagggaaaaagattatcatggtttgtagaaagaagaaggagaggggaaatcttcgtataaatactgctcagagaggcatatctgatgccaggctttggaaccagcagggccaaaatcaataacattttttaaagatgtaaagagcgttttaaggattatttatgaagctgatctctgtgttaatgtacgtacagacttgtgatctatgttgaacattgttgttctcagaaaggccaaacaaagatgtacccattaacatgtgaacaggtttcagaatttcccttttggttgttcatggtatatggggagtgtatttccgatgtggagagtgaaatgcagaaaagagacaattaccaaaacagtgccacccacccttccactccctcctccctagcacaccgtgtttttctatatcgtctgcatattccaggtaaatgtgggctcttctcatggagttactgagaattctctactgttttagaaggcaggcacagagtaagaaacgaagctgtaaaatcggtattgatcacagacaaaaatgtggtttgtccttcaaggtacaagatagatatgagttatgcagatttgtgcttacagtttcatccagtccatattcatagttcctatctattttggagggttaaatgtgtcccagtggggctctggattcatcacaggtagaaaataacaagccgtgaagtgaatatttggttcgtcatatagttaccaaagaatctgaaggttttttggctacgttgccaagcatttttagcattaaatgattaaaagactatttttctcgttttaagaattagtcacaccctttattcttttcttctttccacttgtgctcacttcttttgcttagaactgatttgcaattgaagtgaaactaagactgcaaaggtgaaatctaaatctgtttttctagttcttttgcattgcttagaaataaaaggtttgtgtgttgaaggtgagaaaggttagcttctggaattgtttgaggagttcatttatctatgttattcaagtcccccagaatcacagataactgggagaatagtacctatcaaggactagtatcttaactcacaaatgggcaatggaattgggggcttagaatttcctccttcttccagtaaaggagattttcagttttgccgaggactgatggattaaaaaaaaataatttctaaaacccttttcataattttaaccttcaaaataaattctttaaaaaggcaggaatgtatgtatgccaacagtcatgaaatttctttagaagatggggagctccatgaagccctcattcattctatgtgggattctcctgtaaattgtacacactgtttccctttccttttagaactgtgtttggtacaggtttatttcttgcctatgttcctctaatttgaagtccattccagatggtggcttttcaccgtggttccctgtctctgtctgatcaggcttatcagctcagctaaatgtttttctgcagacctatagaagatgctacggtccttacaaatatcctggagatgggacattgttgttacacagtgtgactagtaagggcctgtgtgagcccttgtacatgtgggcacacatgtgtgtgcttcctctcttcgctcttcctttctccctggtgcttatatcacatctggatgacctttggaaatagaggaggcctgaatgcagggtggtctcaatagaaggtaacctttccttgctctgcacttatatatggaattggtatacactcactttccgagctgagaaatgcctgagaacaagcaacactttttccacgaagctgcaagctgcagcctccttgtgctgtgcatgtaaagtaccagtcctgcctaccccttctccagatcataaaccggcttggtcatggggtgtcctaaaaccccttaaagcatagagaccatatctcctgctcttcttgctctttaagacttgaatgtcactctgttatattccctcaactgataagcccttgttatagtcctcaaatgtgagttgtctctatggaaaagtaaaactgaaataaacgtatttggaagacagtgaaacagcacttcacaagtgaacattttcttgcaaattgatttcagtagccctcactgttcaatcactgactagtaaatattacagggatggtctttgaagttgtacagtttggatgatttccatatgtctttatgaggtttatgattgtgttccatttcttaaaccaacttaaacggttgttttaacttattttttttaaacataggtgataacatgtagtgtgttggttttgctctctaggaagggtctttcttcgccttgattgacttaattacagttggatccacatctatattgtaatcaactaataacagatttgcttttaatagatgacaatttgaggggcacatgataccaaaagcgaccacatattgagcaccaaatggtgccggtcacttacctatttcaactaatcctttaaccctccaaggtaggcaggcttgctttaaatttcaccgccagtagggcgcagagccctaaaattcaaaacatacgctaaggccattcgacattgttgcctctccagactcctctttctgtgtgaggcccctgtactttctggtcctctggaaatgccccagtttaagcgatttctcttttttccttccctccccttcccctcaaaagtttatgaataggctctgcatatgagtacccaaatatcattcagaactgcattttactgtatcaaagcctgtcatgcaatccctgaaaactggaaatatgacgctatggtgatttatgtagatgggccaaagtaaggaaaagtatatgtagttatttctccagggtttattcatgtaattgaatgaggaacaaaggtgttttgttctttttgtggcaggagctgatagccagcaaccacacttcaagaaatggaagacagctgtgaatgcttcattcaggcccaagtaaatataggaagaggtgtagtggtgtatagcgtactgcgtttaaagaaaaaacactctgaaataatgggaagaaggaagttatgatatattagtcaggcagtagatataccttaagctgaaatgaaatacaggtatcatggatatgagatctgtatatgtagaggaaagagtaatggaaaaatgtcaggggcagtgaaagcaaatgagaagtgagatgatttatatttattgaactaatgtccggtatctctttgacagagttgaataataatcagttgtcggtgtcctttctgtagtgttccacattggatgggtgaagaagtcctgatagtcgattattgatcacataacaaggtcaatttatcataactgaagtgcgatcgatttgtgggtgcaaagaagaaacaaattctggaaccgaataatgtttatattgcttttctctttggaaacaaagcagaaaggggcctttctgcttgtaagataaacatttcttcaatacactatggaagcgctttgaaataaagattccgaatggttcaaaagcaaaaatcatgttgttgttattgttgttttcttttttcctgttttcttgactactcattgtaaatgctaaagtctttctttatgttttgtgttttagccacgagactcaaacaacttgctgggaccatcccaaaatgacagagctctaccagtctttaggtaaggacatggccatgtttcctccaagttaaatgacaggtgacctttaggataaagtagtttgcagtgtgaaagttacttgctatataaatacatcactagattgtttcaagggtgaaagcagtggcaccttcctatccaaaattgacagtcagctttctttttatcagaggttccttaaaaacaagttttagaagttgattgattcctaaaaattcaatatacctgagagggcctataggtctttgtagttctctttggtgcctaaaatgatggaaaaacagttgcaatttatggctatttttttttttcttcccacgaagatagaaaactgtttcaggtgcttgttgatttcttccgtgtgaaaccaagacaacccttttgccaaaccacaaatgttgtgtaaaggaattttctgccgtctttccggtgctcacaattcctaaggcctggcgggtcattaatgtgaacatttaaatgatttctttagtatggcttgttttgtgtttatgtaagagcctgacagttctgttttctttcccctcataacttgaattattttgaatgggtacagagcatacaaataagggtttgaaaacaccagtctttttacactggacaaatgtccagatgtctggtttgtcgttttagatctacaaggaatattctgaaatgagttatcttaagttgcagcttgttttgggttttgttttgggacagggtcttgctctgtctcccaggctggagtgcagtggtgcggttatagcttattgcagcctcgaacccctgggctcatggcggttcttctgcctcagcctcctgagtagctgggacaacaggaatgcaccaccacacccagctcatttttaaaatttatttttatttatttttgtagagatgggtctcactatgttgcccaggctgtgtttttatgtatttttttaatataaaaacgtcatgtcttttctactttttcaagcctgcatttctgtgaatggacatattgatagaaaaacacataaggcgatctctttggatttaaggttatgtgatgaacactgtgggaatcagggtacttaaacataaattctgtgtaggtatacgtaagtggggtgtgtgtgtgtcagggggtacgtagctattactgcttttgtgtcatagattctcacaaaatgaattgcagctatagagacaccaaggactagagaagagatattagccaaaaaatggttttattaaacatttttctaattataaatgattaaatgtcttctagaaaacctgaaaaatgtaaataaaaaacatgaaaaaggaaaaacaaagtcacttatactagccagagagatccaatacatttcgagtaatattatgtcatttcagtctggttataagtgtgtaaacgtttaaaattttaaataaaattgggatcagctaattttcaagtgctacatttccagcccctacagaatgtttttggcttataattgtggactgtttataccacaggtggaaaacgtgaatgcttatcttttggcaaatgagagaatgaaaaggcttcatctgaagtgggcagcagctgtcctgggcaagctggtctttctatcccagtactcccaggacccctgattgtacaagagaaaaactagaaatctgtccacaaagagctaatttaaattagtctgtgggcctcctgatcgtaacctgtggtttacacagatttagcccacttctaacatttcctactctaattacagtaatttctagttgtaatattttaattcactcttattttaaaatcattattattatagaattaatacctattcatatttttgaagtttaaaaatatagacaggctaacaataaagaagagacaaatcattcgtaaccccacttcttagagttagctggtgtttaatagtctaggatcttcaaaaatgtctttctatacatatatttttatagaagttgaatcattctgtcttataacttgctttttttttttccactggaaagtaatgtattaccatggccatatttccattttgttgtatagtattctctaccactttcaattactctgtaatgagaaattgcaaacatgtttgatgaaaagctaattatggactatcaatgaatacatgtttgctcctttaatacaaattaaatatacatttaatcattatatttctaaaattttctccatactttagatgtggtgataaactcaaaactgataatctctcatgacttgtgacattgggcttgtgacatcactcaattttgaattataacagaattttacagttgcaggggattttagaactcatttattgcaaactttctcttttatgaaatcaactttcaggtataatttttatataataaaaggaagtcatcgtaagtgtgtgatcaattccagccccctttgaaattctgtttcttgctagcccaataacaaaccacttgcaagtgaactaagtgttgaagtttgcttttcacctttcagagttaatatttccaatagttttgtaacaatcaaacattcgttgggcttttatccaagtggtgattcatcagataacatctcccatttattgcgggcctattgtatgttttccacatgggatgtgccagcaaccaacctgcatggtggatggtatcaacatccacatttcacaggacagcgaagccaggctcagggaggaattgatcagggctacacagctatgtggggctacacctggatttgtcctcagttttctgttagtactttcactgttctcattgattttatttactaggtaaagtatatttatgttggttactacatacctgctacacgtatataggaattgatagttttacctatgaatagtaagttacttgagtggtatttctggaaatggtatggtgggtcctaaacaatgggcactcctttcactgttgcctggcacatatagaatgattgttatatggctacatccttttttgtttgtttgttttttgagacagattctcactctgtcacccaggctggaatgcagtggcacgatcttggctcacggcaacctccgcctccccaggatgaagtgattctcctgcttcagcctcccgagtagctgggattactaggcacccgccaccatacccagctaatttttgtatttttactagggacggggttttgccatgttggctaggctggtctcgaactcctgacctcaggtgatcctcccaccttggcctcccaaattgttaggattacaagcgtaagccacagcgcccagcctgcctacatccttgagatcccatataagattaactaccagcactgcctttccccctctccaaaattacagtgtttcagagtcgaaacataagcataaaatactgaaaagaaacttttcattgattttagtttttacttattagtttatatttttcttcttcaagaggtatccctttaggtccaaattgctctttgagctggatgaaatggtcggaagccttcaactacagtcagttggtgaaaggtatcttgaaagcagaaatggtgttgtggtctggcgtgtcaaatgtttaagaccacatctagccccctctcctaatcgaacctgaacctcatgtctctggtgaggtgctgaaaatatcaagatgttgctttttccctctgtacccccactccaggcatactctaccgtggaagctacagtggttcacagtatgcatggtaggttacacattcctagagacgcccacttctaaggagatttccattctctaatttgccaaagttcccaagcagcctgttcaacacatgtttatgttacctgccttgccctcaaaagcattcaggtgttcccctgcacccagggtttgaacacaataggattagaaggtgaaaacattttgttagaactgaaaaagtagcaagtatttactgatgaaaagctataatattgcttgagatattaccattggagctctctaatacattctgggtggttttctttttcattccttttccactgattttctacaatgaatttatattatttacagttagatgtttggtaaaaaagtttcttcgtcgatacccccattccatttcttacttagtgtctctatagctacaattcattaactaatgagaacttatgacagaaaagcagcagtagccacacacacacacacacacacacacacacacgccccacatatatgtagataatttatacttaaggaccctgattctcatggactttgtcaggtaactttaaactcaaagagatcatctcatgtatttttagtctgtatgtccagttgtgaaaaatgcagatgtagacattttagtggtagagaaaatagaacttttttgattaaaaaatagataaaaaacaatataagataattaattttagattatttccaacagatctaaaatggctttgcagaggaggtttccatcaagtgttagaaatattgtgtttccctcatttatcggctgtgtacctacacaaaaaattgagagaaaatattgccagagtcctacacaaacaaagcaagacatagtaaagaaataatttaaaggttcactatgatgactgaacagtcattaggaatttgagtccccagaaaattttttacatcacattaatggtttgacaaaagcattgtcttggattttcacagggaataaatcactaaaagcaactggaaatcagttttctttcagcatttgtctgtgactacccccaatagtcatagaatggtagtagagaatagtagtggagtaagtgggatataagagaccaagtgtctcatgtctattttttgtagaccttggtgctttatctttaaaatgtgaggatattggggctgggcacggtggctcacgcctgtaatcccagcactttgggaggtcgaggtgggcggatcacctgagtcaggagatcaagaccttcctggctaacatggtgaaaccccatctttactaaaaaaacaaaaaattagccaggtgtggtggcacatgcctgtaatcccagctactcaagaggccgaggctgaagaatcacttgaacccaggagtcggaggttgcaatgagctgagatcacgctgtagcactccctcctgggcaacaagagtgaaactccatctcaaaaaaaaaaaaaaaaaaaaaaagtaacgatattggacaagtgtctaagatttttgtttttcttttactttgggctgagggtggggcaggctgtttctaaacttgctgtgatcattatttttcaagaggtacctttcggctaactctgcagacaagtggatttctaaaaatgtaatcattcctatgttttaaaatgtacattctgagaaaacaaacaacaggagaagattatgccacccatccgtgtcttacaggctgagtgaggcaagctgttgtcaaatagagaggctcttgagatatttcccattagactcctctgggtcattcatttgttattgagagggtacattcttcgtcactccctagaagtaataatatgtttgattcatgaggtgagttttagatttctattagcatttttacaaatgtaatggaaagactgttccaataggttagcttggtgatttaaaactctgagctcttcaaggctccagaaagcatttacaacatcagtagatgttagatagtaatatgctctggaatttattttgaaatactaatataatattgatttacatgaagtgcaattatgtggttaaaagcctgtccttttctcacaatttatgtctaggtccctaagttcattactgaaattttaagaaaatattttttaaaaagctcaccctgcccccacacacataatatatgctgcttagagatacttttattggggtttttttttttttttttgacagcatcttgctctgtcacatagactggagtgcagtggcctgatcatggctcactgcagctttgaacacccaggctcaagtgaccctcccacctcagccttccaagtagctgggactatagccgtgtgccaccgtgtctggctaatctttttttaaattttttgtagagatggaggtcttaccatgttgcccagcctggtctcaaactcttgggctcaagcgatcctcccaccttggcctcccacagctctgagatcccaagggtgagccactgcacctggccttcacaatttccaatgtcaaatcttactacaaatttaagtaatcaagagtatttacatatggacagatatactgaccaacagagtagaatttaggctgggcacagtggctcacatttgtaatcctagcacttttggaggccgaggcgagcagctcacttgagctcaggagttcaagaccagcctgggcaacgtggtgaaaccccgtctccccatctctacaaaaaatacaaaaattagccgagcatggtggcatgtgcctgtagtcccagatactcaggaggctgaggtgggagggtcgcttgagcccgggaggacgagactgcagtgagccgaggttacatcactgcactccagcctgggcaacagaacgagaccctgtttaaaaacattatttcttagcctgtcttattgggggggggtctcttaattataaatacaataaaatatgtggttccccaatggttcctttttaaattacaatgtgagtttttttgcatttgtgatactgtcagtatagtacaagaagaccagtttatgaaggagacatgtaggtaaaaataggataatgtgaagagagaatcgctgcacttcagaaagctgattttatttcaagcagtttattaaaatctagatgcaccgtatgttctggtgttacttattccaatttccttttccttcattgaagccctcttaaccacaagtgttttctcaaggggtactggttttccttttcttaagttatagcgttcttcagaaggatctagccctttttaatctgttgcccaatttttggatcctactatccagcatgatgctcacctgaatgatgcgaaagctctcaattttcaaaaatggacttctgagtgtttttggaattcttaggaaaagtggtctttaaaaaccataagatttgaaggcagtctatcagcacgtagcccttagcttcatgtctatggtttgcagagagcttcagaatgttaaaatgagggtttaattttagggtctgctgggcctgaggttaggggtgtgattcttcagcagttctagttaggagaactagttaagtcctagttaagtcaatggggctaaaagctttttaaagatacatcaatatcattataaatcagcaatttgcaagagagttaaaaacactgctatcaaaatccttgtacctctttcctcagcttgcccaagaggaagggatattgtagttatttgttcactctcctcttttgataggctttctacattccattaagtattccctcctgaggatgctcttgggttagaaactgcaggattctgaatgactatgaattccttccttttgcattaggagcttgtcctaatgcttttctcagcatattttgtgaactaaactgttctccactaagctactcaatatttagctttccttggctcttgcttctagttccttaatatattgctcagtgttaaaacctctgccttttgactttttactgccataacgctttgaactggaaaggatagctagattcagatgccagctttggtgtgacctcgggcaagtcccttgctttctattggtcttcattttcttatatgtcatgttggccagtgatctttcatcattaaatgactggttttgttttaacccctggctagagtaaagcttggttgtatgaatgttgtcagccctaaacccccagttcctctttgtcaccaccaacctaaaggatatgaataataggataatcatatttattaatttaattttttttttttgagacggagtctcactctgtcgccaggctggagtgcagttgcacgatctcatctcactgcaacctccaccgcccgcgttcaagcgattctcctgcctcagcagcctcccgccaccatgctcagctaatttttgtatttttagtagagacggggtttcaccatgttggccaggatggtctcgatctcttgacctcatgatccacccgcctcggcctcccagagtgctgagattacaggcgtgagccaccgctcctagcctataatcatatttgtaataattgtactttatttgtgtagcactttacaatggcgaagagttttcagaaataaccatatttaatcctcacacagctatagagtaggtggcatatgacctggattttctatcaatttcagtttcagattttttgtcctgtcatccctttgagtgtccttccagtttttgatttgggaaataatgctaccataccggtggatggggcaacttttcccttctttccatttggacttgagcagactgagactcaagacttgatttgatttatactcactatggtagaagataaggaaccaagtccagaacacacattttacaaactccgagttctctgttctcaaaggaacatccattactcttagcatgatttataaaactgctttatcggcataattaaactggaatccatatgacattctttattccctagctgacaaaattagcacaggagatttactcaaatttgttattaaggctgttataaatgttcttcctttactattcagcttataaaagaaaaaagaaaaataatctgctcttttaactttgattaggatccattgactttccccatttgtaaaatagaaatgtaacttccaaatcaaaatttatggcattttaatggactgttctaaatattataatattttttcttgttcaaataacttgatttaaagcttctaattgaagaacataatagatatttctgaattgcatctctccaagcttatttcagaaggaaactcaaaaagaattgttccttagactttgactggtttacagttttaaaagagctgccaaattgtagtttactgatctaaataagaggaacattaaggttacacctgcagctagaagaaaagtgctggatatgtacaattttatgtagctggatctgcagaagatgatttttgcacacagagtaaaggcatctaaaaacgtgtctgctcttattcagacatttccaatatttcttttttaagcccacaagtctgattacctctgtatgtctcttgggagctgcaattttgctggaaagagattcagaacagtcagagcactcacataaaatagatagtttttaaagtctgtaccctctacggtagtaataaaatgacctaaaaatattctgaaagtctctcttatgacatagtggatgaatcattagcttatttatgaattggtgatattctgtgggaatgtttcaaaatttgctattccacaaagcgttcatcgcttgcataactccaggaaagtcattacaccccctcataaatagaagcttatataacggagacaaatgttgcttatattgatatatttacatacagatttctttaccaagcattaattttggtaagaaagtgattgtttttatattttactttcttggtctgtaaagaggctatcactttaaggccaggcatggtggcacgcacctgtagtcccagcgcttccagaggctgaggcagaaggatcccttgagcccaggaatttgagtccagcctgggcaatatagcaagacgttgtcttagaaaaaaaaaaaaagaagctatcactgaagagcagtgcttctcaaactggtgaagggccaggtttttgttggtggtgggtttttttttttgtttttttgagacagagtcttgctctgttgccaggctggagtgcagtggtgcgattttagctcactgcaaactctgcctcccgggttcaagcgattttcctgcctcagcctcccgagtagctgggattacaggtgtgcaccaccacacccagctaatttttgcatttttagtagagacggggtttcaccatgttggctaggatggtctcgatctcttgacctcatgatctgccagcctccgcctcccaaactgctgggattacaggcgtgaaccactgcacccagccgcggtggtggtttttaacatactacacatcacagatttttaggtggtgctaatgaaactgacaagtatgcattcacaccacatgtaactcaacagtcaagttcaacaacacttgacctcgtctgtaccctgctccatgagatgaattcattgatcatgaatttggatgtcatggcaatgtcaaattgctatagaagttacttaacacactgtccatatctatgcttgtgaaagaccatattttgagtagcactgttctagagcacttaatttttgaaagtataaatgtaaactcaaatcaagtgactcaggtcgggggaggataattaaccaaacaggaacacctgaaaatgttatttatgcggtttaatgttttgccagttgagtcaagttcaggcagaggagggatctattttctttcccacttggtagctctccttagcaattgttttagaagacaaagcatagaaatcattgtgttacaggaaggaaccagagattaagcggcagagccactgctgcctagtttaatgtctctcgcaccccctataattaaatataatgtatataatgtgataagtttaaaatacaggtttgcttttatctagaatataaactgtgatatatgcactctttatggggtgcattcagtgggggaactaattgattatactgtgactttcctattgtcactttatgagtttaggtttggaggcaatgttttgcagcaacaaaattgttcattgactttgaggctggatttaaattctgattctgtcaccagttctctgtggtcaaaaaggaagccactaataattttaaacctcagttatgtgatgtattaaatagttatgatgagacttatcttgtgttgtgaggattagaatgacatatgtaaggtaacagaatgtctgatgtagtaactgctcaaggaattataattgctattagtgatatgcattattattattagttattattatcatataccagtgtctctccttatttaataatctattgggttcctgaattgagataccaagaattcagatagtgagagacacctaggtttaggtcttcacatttgacactcaaggagccactaaatttttctgaagtattttacttcttaaccaaggtgataaagatcacctgatcacaatttatcctaacttttggaaagcatacacgtactttaatttgacatgcaaattaaaataatacattttgtactgtgttgtttgccctcccccaattctaaaataatatatcattcaggataaaaaagactacactttgggaggccgaggcaggtggatcacctgaggtcaggagttcgagaccagcctgggcaacacggtgaaaccccatctctactaaaataaaaatttaaaaaagccagaagtggtggcgtctgcctgtagtaccagatactcgggaagctgaggcaggagaattgcttgaacctgggaggcacgggttgcagtgagccaagatcgcaccactgcacttcagcctgggcaacagagtgagactctgtctcaaaaaagagcataaatatctaataaatgatggtggtactagtctgtggtagtggaggtatcacagaatggctgtagagatgaggagggctaaaactgtgaaaagccttatatggtatgttgaaggttttttatactaaggtttttgatttggaagatgtatcaatcagggtctgcctggtcagaaaacataaaccctctagttatttcaaacaaagggaatttaatgcgggaaattggttactcaagaatggaagtgctgagaagccacacacacagcatgaagtttctgttatacctagggctggagggacaatgacaagaggtggtatcaccagagccccagatgtcatgggcatcaaggcggagttggaacctttggccagctgggaccaatgagggaggggctccgagggagctggagccaggaaggagacacagttagccagacctattgccggaggtagaatgaaaaaggaagtacgcccggcttctcctttccgcctgccctctaggcttctgccagtgactcctattggccaaacttacttggaagccaattggtaagggagcaggaaaatgtactgtaataaacagcagagcagagaaaaggcagagaaagtatcaaaaaccaacaagcaaatgattgaagtacaggagatcccatggacagtaaggcaaccaaccctctatgcagatatttcgggaacaagaaacataaaaaaactaaaaagctttcataggagtttgaggtgacatagataagataccagaaggacatcctgggttcaaaggaaactgatcttaaaggagaggaggtagcaattaaaacaaattatctgcagagaagtccaaacactaaggataagcttccatgcatttgatgaaagtacttgcgacgtttacaggtgtttatgctcatgactctcaagactaaatacagacataccttggagattttgcaggttcagttccagaacacttcagtaaagcaaatatcacaataaagtaagtcacacaagtgttttggttttctagtacatataagttatgtttactctataatgtagtctagtaagtgtgcaacagcattatgtcttaaaaaacaatgtacataccttaatttaaaatactttattgttaaaaaagctaacgatcacctgagccttcagccagtaatgatccttttgctggtggagggtcttgcctcgatgttgatggctgcacagcatggtggttgctgaaggttggggtggctgtggcaatttcttaaaataagacaacaatgaagactgccactcagttgactcttccttttgtgaaagatttctctgtagaatgtgatactatctcatgaaaccacttactttgctcatccataagtagcaactccctatccattaaagtttgatcatgaaattgcagcaattcagccatatcttcacgccccacttgtgatttcaattttcttcctgtttccactacatctgcagttacatcctccactgaagtcttgaacccctgacagtcatccatgagggttggaatcaacgtcttccaaactcctggtaatgttgatattttgacgacctcctatcaatcacaaatgttcttaatggcatcaagaatcacttccagagattttttttttttttttttttgagacacagtcttgctatgttgtccaggctggagtgcagtggcgtgatctaggctcactgcaacctctgccttcctgggttcaagtgattcttctgcctcagcttcccgagtagctgggactacaggcgtgtgccactacgcccggctaatttttgtatttttagtagagacggggtttcaccattttggccaggctggtctcaaactcctgacctcatgatccacctgcctcggcctcccaaagtgctgggattacagccgtgagccaccacacctgacttccagagattttccatttactttgcccagatccatcagaggaatcactgtctatgtcaagctatagccttacaaaatatttctcaactaataagagttgaaagtcacaattttttcttaatccttgggctacagaatggatgttgtgtaagcgggcatgaaaacgtgaatctctttgtacatctccatccaagcttttgggtgacaaggtgcattgtcagtgagcagttatattttgaaaggaaacctattttgaacactaggtcttacagtgagcttgaaatattcagtaaaccatgccgtaaacagatacgctgtcatccaagctttgtttttccatttatacagcacaggcaaagtagatttcacataattccttttttttttttccttccaagacggagtcttgctctgtcacccaggctggagtgcagtggtacgatcttggctcactgcaacctccacctcccgggttcaagcaattctcctgcctcagcctcctgagtagctgggattacaggcgtctgccaccacacctggttaatttttgtatttttagtggagacggggtttcaccatgttggccaggctggtctccaactcctgacctcgtgatctgcccgcctcagcctcccaaagtgctgggattacaggcatgagccactgtgcccggcctgatttcacataattcttaagggccctgtgatttcagaatggtagatgagcattggcttcaacttagtcaccagctgcattaggccctactaagagatacagcctgtccattgaagctttgaaggcagtcattgatttctcctctagagctatgaaagtcctagatagtatcacctttaaatagaaggctgtttcatctatgttgaaaatctgttgttcgttgtagccaccttcatccatgaccttagcttcatctggaaaacttggctgcagcttctgcatcaatgcttgctgcttcatcttgcaccttaatgttatggatatggcttgtttccttaagcttcttgaagcaacctctactagcttccaacttttcttctgcagcttcctcatctcttttagccttcatagaattgaagggagttaaggttttgctctggattaggctttggcttaaagaaatgttgtggctagtttgatcttctattcagagcactcaaactttctccatatcaggaataaggctgttttactttcttatcatttgtgtgctcgcagggtagtacttttaatttccttcattaacttttcctttgcattcacaacttgactgtttggcatgagaggcctagctttcagtctgtctcatctttcaacatgctttcctcactaagctcaatcattaatagcttctgatgtaaagtgacagaggtatggctctttcttcccttgaacacttagaggccattgtagggttattaattaccctgattttaatattgttgtgtctcagaacaggaaggccagaggagagggaaagagatgggggaacagctggtcggtggagcagtcagaacacgtatgacgttgatcaattaagtttgccatcttatgtgggtgtggttagttgcaccccaaaacaatttcagtagtaacatcaacgattactgatcacgattcaccataatagatataaaaataatgacaaatttgaaatattgagggaattttcaaaacgagacacagacccaaagtgagcacatgctgctggaaaaatgtccatagacatgctcaacacaggattgccacaaaccttcagtttgtaaacaatgcaattttcacaaagtgcaatacagcaaagtgcaatttaatgagatgagcctgtaatgagcctctttaaagcaggaactgtcttcctcatctttgtcaccagtgcctggtgcatggtagcctctgaaaaaataattgttcattgaatgaagcacagtagagcaagggagagtgattttgctcgggaggaaaacaaataccactcaagaagatggaaagatacagatgagggttttctaaggcggattattaaactggcaagatggaactctggagagatggagttctttccagaaagtagaagataaagcctcaaagtaattaaaatagggaatatcagttaagttgtagattttattggcaatttgttatcttagcaaaaccaagtgaactgctattctggaattaattttgccctaaaaggaataattaattgataaggagaaataagacccgtaaaaagtgtcactatggattcagaatttatatgacaaagaaaggaaacactgaacacaatttgatgtgctgatggcctcgttcgttcattggtttcctgcttcagtaaacatttaagagcgtgccatgtattttcaaactttagggcaacaggctaaaaatatcaaggagaaaaacgtttactgagggtatagaagtttttatgatcttacttttattgaacattaaaacatggatgttcattctagaaattttagaaggtgaagtgcaaaaacaaaatgaaaatcacctcacatctcagtacccagaaatagccactatttacattttaaaagattgcttccggtcttctttcctatgcatttttatatagttgtttgagataatagaatgtttaaagtgttgtatcctactgtaatcataagtcttctcttattcttagttcctcagagatgttatttttcgctagttgcagtttattggggtaccacttttgtaaaaaaatatttcccaatttttgaaaattgtgacaaagaaaagtcaaattcgtgttgaatttatggaaggaaatctttaagaatctggaggcttattactaacaagcttctgagaagaaagccaagtaaagtgttataataccttctgtccaacaagctacttatgtataagtgatgttacagaataaagtcagtgtggtcaaaaacagacagtcagttatcagaaagttgataagtaacatttatcctatgaaaaatatagctatgaatttaaatcaatagttttctaccacaaatatcttaatggataaaattttctttaccaaatatgtatggtgtcaaggtgacaaggcaagtatccttgtaaactttccgaattacaggaacaactttgcccttcttagcaagcaattttatacagaaactcaactttatgatgggtttctgtaagttttaatttttataataactgatatgtaaatatttagttacctttaacttatctctccaggtagaatggctagcagactgttttatcttctcaaaacatttgtgtgtacagttcccatgttcttttcaaggttcttgcttctaactgtcagttaaggcttttgtagcctcttacttcagttacattttctggccaagacgcaattaaagaatatagagctgataattatttccatagtcgtttccaatttttctactgttccacgtaagactttgaggaacacctttatgcataacacctttctacatttgattcatgtaagtggaatcactgagtcaaatggtgttaatgtttctaagcttcttggaatgcactgcctgaaactttctcaaaaggctgtagccatttacactcataatacttcaaagtgccaatctaaccatgtccttcccagcatggagtattatttttacttttgctattgtaacaaggaaaattaaaccatctcattgttaatatttgtgtattttttatttctagtgaccacaaatgttttcttttaaatatctgctgggtgtttttcttcttttttgagtaatgtgaaaacaaaacgaagttaaccaaacacaactcttccaaacttttctgatataatacacacttttttgtgtgttatgttgaggggctctagttggtaacagcctcctggttacataaatactgtacagtttaattttttttcagctaaataagccttatccctttatccatccttagtggatctattatctacccattaaattaaattttattctctataccaactcctgtttcttcacattttttaaatatatgcagagccctaaattacagtggctgtcctaataaaaggctattcagttattaacagaaaaggaagattgcttcctgcctcttgggtgaggaagactcatgtataccatagatatggtcagtttacatttacagttttctgtgaggcattgatttttttcccccataaatatggagtacttagaatgttcaaaacctttctctgggtaatagaatgcacaaaagtataaggcatgatccctgttcattgcccaagctggcgtgactctggtcatgcagcggacttcatgatgtgatagaattccttgcctatgagagtgaaggagatggtaccaggtctacttgtggccggtggtggaacacttacattattctaagtcctttctgtctgtagaacccaaatgacaaccatattattttatcttctcttattgctagtggtatcgtttattaatgccaacgtatacccattttgcttttcaaggttactttagatgtcttaggttggaatgactgaaggcttatacattcaaatttatatatgacacacacacacacacacacacacacacacacacatatcttattgttgcctgctatctttctacctgttgtataagaaatcctttgaaaaaagcctatgtcagcttcacaaaagatgttactgtgttttgggggaaataaaattgggaagtaataaaacagttaataaatgttacaagaccgtgtacaccaacttaaataagattaaggtcaaacgtatggtaccttatataggtaggaagagcagtattaattagaataattagggagagttgtttggagagtggaaaaaaacattgttctaggaagaaattttgtaatactcaggtaaagtaaaatgtagggccaagatattccagatagtgtagcagcataaacaaaggtatgaaagactggcttgtttgcgagtcagtgaagacattgttctctgagaatctactccagatttttttttttttttttttttttttttttgctttttgagacagggtctcactttgtcgcccaggctggggtgcagtggtgcgaacatggctcactggtgccacaacctcctgggctcaagtgattctcctgcctcagccccccaggcagctgggactacaggcacacaccgccatacctggctaatttttgtatttttggtagagacagggttttgccatgttatccaggctgttctcaactcttgagctcaagccatctgcccatctcggcttcctaaagtgctgggattacaagaatgagccaccgcgcctggccactccagatttttaaaagggaaatctgattcagtgcccctggggtgaactaagtgccttaaattatagagtgagaaatttacattgcatttgattggcaatgggaaaaacattgttaaatcttcagaaaagagaaataatgaagtccgtcttctgtgttttggaataggaatttggtgggtgagtttaaggacagttagagaggggagagattatttcgttttgttttgaggtaattgacatgatgagggtcttaggatagcaatgggggaaggaaaagggaacgtgactccagaggtttttcttaacaaggtagaattgccagaaggtaatcacagattggacaggttttaaagaaaaagggagttatatgtcttcaaaatttgaaggcgtggtgacacagagaatggtgataccattgaggaaaagaggaaattgcaaactgagcggagcaacagggaatagatatgaatttgattgaattacatacttatgggtttatttacaatttctcttcttagaaaaatttatttttggtggctcatataaatgtatgtgctgccataccataagcatatatttctcattaatcctttcaaaaaccctgtaaaagatatttgtatctccattgtgcagatgaggctcagagaaaataggtaattttctcacattgcaaagcagggatttacgtgtacttttaactcctaaaccagcgatttagcccctcagctatactttcttcctgagaggggacagtggcattttgaagaggaaatactctaaagccatttgaaaaggggaaccgaagaaagagtttggtccacagcatgataaaaatattacttgcacttttattatactttataacaagaagtacaggggcagagaaaggttcctaacttttactgagcaagtatatatccaagatacatctcctctttggagcttttgagatacactatctctcttagttttgcaacagccctaggaataggtactattactgttccctttaaaaatgaacaaaaaaaaaatgaagcttaggaaagttaaggttactagaccaagcttattgggagaccatagtgatgaagaggaagggctttagggtcaaatggatttgaattttacttcttaggcctttggtttccttatttataaaatgggattgaaataatgatatcacagttgaaggtaattatatgagaatttatgttatttattgcaaacatagggtaagcacctaataaatgataacctgagaatttatgttatttattgcaaacatagggtaagcacctaataaatgataaccattattactattattttacagcaaagacataaatagagcccattaagttttcttctctacccagtagtttttccattgtacaatagtactctcctgaaggacagcgggtgaagctaagaatttggaagaaatcccagatagagaaatcttgaaaagaagatagatagatttaatactcaatcattaaaaaaagtgcacatgactttaagaaatcaaacattgtaagaggatagtattgaaaagtaagtctccaaccactcttggtatcaatcccctaattttacttcctagagacaattaacagtatagtttttatgtttgcttctgtaaatatttttgcatatacaaacatacacataaaaatatgcccatttttgcacattgagagtataataggcacaatgttctgttctttgatgctattaccttttacataattaacctggagttttttttttcctgtagcgcaatagactgacagatggtgaatgaaaacttgcactatggagagttatgtcagtgttttaataagacaggaacccagaaataaatgtacgaagtttaacatcagcatctcgtggcctttaagtcaaattggacaaccattcaaagcttcataaatgctaactgcttctcatgacttcagaagcaaacaaaaaaatcattattcaaatgggaaattaagctgatcatcagaagtacagagaggatgtcctttcttaaaggcggcacgtctaagggagtgtctgagacctggcttcttcattcaggatggaggctgctgctactctttaaaagaaatgttcacatccttacttcctgacttccttctataacacagtctgcttcacaacactatgactttatatgtcagagcgggttaggaggagctgaatcttaaaaatttaagaagatgccaaggtctagaaaccactcttaacaggggaaaattagaccctgcttgcttttgggaaaatttgttttccagtcagatgtttgtcaaggttaaagaaattcacgggccctctgttcgaattgggagcaattgggagcccttaagctgaatgagtagacttgaagtcccacttagaatgagcctttatatttttgttctgtggcttgctcagggaagggatacacacttggggagaaaaagacttggattctagttgatgtttttctcctagctgactagggaattcagaacaagttactaagagctttctagtccttagttctctcatttggaaaatgaaaattttaaattagagattctatttctaaggcaccatgtatttcattttcttaataaaaagtatatatattcccctaaagaatactcataagaaaaaggtagagttaaaatttcccaaattatttaattcctggttgcccagtaaccattaaatttctcagcagtcaggcaagaaccacattcccaccttgagacaagatttaggcctttccaaacttaccctcgggctctgttccaagtttatttgtaagtcagttgcatacaatttggaatgaaatgtgttataaatggtggttaggtccctaagtcacagaatcttagttaaccctcagagtgcctgatatactgcaccatgtaaatagaaagcagctgtatgtttctatgggagcaaaaaacttttgtaggaaaaatggtagaaactcgtactgcaggtgttgattattcagcaaacttctctagataaggaggactgggaacttcatcattattggtctagttacattcctggtcactccctcatcccattgactggtcagtttccctccctgtggtccttgtgcaagggtttctgcctcaccccataccctctgctccttgcccggtatcatggttcttctgagggtactactgcccattcacccttgtgctaattaggattacactgggtaaggaaagacatttgttctgtagcggagaagcggggaaggccatcagaggctttgagtgtcagaaagatttggtcttgaatgcaggctctgggatgcaaccgtagggaagttaccaaacatttgtgagcctcattttatctttaacaaagctgataatacagaactcagggccttgtaaggactcgatggtatcaggtacacacgacatttgcccttgagtgctcagcgaatgttagtattccttctgccatcggcctgtcacttccgtttttctctttggctctacagggaatacttgcatacaaaaagagctgaagtaagagtcacctacatcttaggaaaaaagggctgctttaggtttatcctcaagtagttttgtccaggattctgaggagaataaaagctgggtcagatccagtgtgttgaaaagaaagctgaggtgagaagtgagagaaacagagaggcagagaaagggggaatgagccctgtctgctatgaagtaggaggcaatccaaaagacaaggaatccgtggtcattgccactgagaggagaaagaaggcaaactcactcctgtgacttcagggccatccatgaggtgggcagaggaactcagagtctgcccgattcttggattgaatcttcaaattggtaaagctttatatcaagcaactcccaaatgcagcatagttttgaggtgataaagaagagtcttttcaaggctgggcacaatagttcacgcctgtaatctcagcactttgggaggccaaggcaggcagatcacttgaggtcgggagttcgagaccagcctggccagcatggtgaaacctcatctctactaaaaatatgaaaattagctgggcgtggtggtgggcacctgtaataccagctacttgggaggctgaggcacaagcatcacttgaacccaggaggcagaggttgcagtgagccgagatcatgccactgcattccagcctgggcgagagaatgagactccgtctaaaaaaaataaaaataaaataaaaagagtattttcccggagtaccggtaatattggttccagattcaaatgtattgtccagatacacagagggtaaacaggaacgcttcaggcatcctttattaaaagcacctcagtctatgtcagagggccaggcagtccattatctaatgaaaatctcctaccattgatttattttatcataactgcagctgctaagtaattttgtttaaggaatgatttacatattagtgtcttcagcaggatctcatcattagcatctagtctccagaaaagttaacacataacagtgaaaagaaaacattctctatcacatgcttctgcatgcatgggcaatttgagtcataccacctgttcccctcttctgttatgctagagtatacaaaaagcagagatacgcatagtttactatgatcctagatgcttaaatatcttgaattgtgttctatcttggactcattattcatgcataaagactcaacagattctcttcttgcacctctcaaacagcaacatcaacaaaacccaaacaatgtatctttcctaatgaggtgaaagcatgcataccagcctaagacagaaatgttgcaaaaatgttttttgcaagaaggtcagtttgcttttcccatggtaactaaggttaatttctactgtggttcattttggcatccattttattcatgatgattattagagggcatggatattgggggtgtgttgatgttgggcaccagagaaatggaaagaggcagatggaggatgcaaatcattttcactcagaacctaaaatgtttactgttagataaagggtagagaagaatcttaatttgactgtcaaaacatatgattagttgaagttaccaaaactatttttttaaataacatttatcttaagagctataaataaagaggaaattttgcactagagatgaagttatgaacatttcattaactctaaagagttaatgaaaaactagttgattatatgtgttcatttataggttgacacgtgaatttccagagaagtaacttgtatgtttttaaattccaatccttatcttacatctgggcagaatcagacttgtgaacgtcccattccaaacaaatggctaaacactttgcagactttgtctagaagagtgccttacccatataagccctctgttataaaattgttttaaacgttaaattagctgtcaagctgttctgcatcagtggcaccacctggtagcaaggatggagatctctgccacccaagatctctttagtgctcacgtcatttctccaccgcaaggaggattgcgggggtggacgatgctccctatttagtcttctgcattttgttgcttacagttcaattaacatgtcagttagagatgacttttggttgcagttaataaaatatctgaccaattgtatcttaaacacagaggagttgatattttttgtagaacaagaagtctggaggcaggtagttgagagctatggaagagttccgtgatgtcatcagagacctgggccatggtttattctgctgtaccatttttaacgagtgactttggtcctgatggttccaagacgactgctgcttctcaggcaggaagaaagagaaaggacgttcagcctcagagtctctttgtctttccatttgggaagggaaatcctttcttgcagatatcttctcaagcattggccaaaactgtgtccacacagcttcccctggctggatcagggaattgagatcctccagcctttgtagcagagaaagaccaaggagaaagaatttgggaaggggtgttgagtgagccaacatacagttatctgccacaattaaatacagcggattcaccttgcaaataagcattctttttagaccatttattttctttctctctttgtcccaattcctttattccttaggaaagtcttgatatctttgtgaggtgtgtttcaaaaaagaagctccagctcaggttgtaaggagtaagcaaaaataataattccagtgattcagccatagaagtggaaaattatattatttgaagaaaaattagatgtaaaatcaatgtcatcgacagcttaaacctggtaaaagcaaggaagttcctttcagaatctaattttattccaaatacatttattgagcaccatcatttattgccctagatgccaaggataagtgaacacaacatgacctcttcagaagtctgcatttttctcatcttttttccctcaagtataagaatgaaaaataaagctatttctaattagttacatcagtcatttctatcagtattactatagattttatttttattgtatactggatatttaaactaaatttaagcctttgtgggcttagaaattactgtttcatgagtaacatggcttatgtaggaaatttccaatgccattaaccttaaaaatgttcattggaatactgcttatgtcatcttggaaactacctttgcggttgacatataaactgcacgatggtctattttcattatatgtttctgtatgtacataagcatcctcatgataaagattgtctacttgatcaaacttcagccagactcctgaaccttctcctaggcccacctgtgcacttctttgtaaaaatccagctgtagcgagaatcctgctaaatcagtttagcaagaaccaccttcctcttatgtatctgatcaggttcctcatcctccaccatcccccatgtgacgtctgatcaccctggcctgtgtcttcagcaaggttcctgttaagttttttttagctagaatcccccttacccccatgctttctcttagtagttttccatccaccaaaccccaccctgctccttggctatcaattcccacttgtccatgctgtattcagagttgagcccagttctatactgaggtctctttcccactattgcaatattcctgaataaaatctgtttttaccactttaccgtccatctctggtttttctttgacactcacataaccagagttttgtatgtgtgtgttgcttgacacatcacaaatacctgggatacgtgtactgattttttacagggtgaataatctttttgttttccccaatatcttagaaacctgaatctttaacccctgggcttagtacacagttaggcatataataggtgcttaagtaagcgtcaactgatgattttaaatgcagaagtaattgtcacttaatgaaatatagtcaggagactcatggattttggcctgtcttcctacctgttcttgtactgcaacagtaagtgtattaaggcaatatttttggcagcacaatcatttagtttgaatgcattagtaaaaggtggagtccaaagaattaatcgctggaaagttttgggaaaacccagtaacaactgtttccatagagtaatttgagtgacagccaggtaatagctacttattggagggactccacagtcagagccttgacagggacctgaaaaagagtgtaactgaagggtaaatgtaaaagcttttgggagaacaagggagtggtcaggctgaggcaaagatctgaaaagaaatgcctcctggggccaagctggtaatttgaatgactgaaggtgactgggtgggaactggggcaacctgaaaagcttctgttagggtaacagagcctccgttgcagctgactgttctatgagaatgtgagtctctattgtcaggtcttcaggttcttccagagaagcaagacaacgggaaatcaccagatttttaactaatggcgtatcattcaacaatttcaaaaaccattatgtgagcccaaactgaccaacgaatcaaacacacacacacacaaaaaaagagtctgcagactaaattcaaccagttggtgacctctggtctgtggttaccagagaagtaattgaaatggagttttgggagaaagatcatatgttgaaatcttgggagataagggcagagaaataagtaagccgagacggcggtaaggccaaggtagaaaaggtagcctttaggaaaattaagttaagactttttaaaacaggaaggggcaaaagatgaggttaaagcagatgaggaaatttactgttatttattttcatcattaaaatacgctttccacaaatttttcaactgtaagagagagtgataaattcaaaataggtaatgtcaaccatattatgaagagtatgtttttgcaatccaaaaaagctaaggcacaacattaaaaaaaaaaatctgtgaatttggctttgcaaaggtataagaattaagtcacatctgatcatttttagagtcttaccttttataacaaagaggaaaatttaattaaactggctctgccctggcgaatctgggatgtgtgttcacttatgaagagagactgttaagattcgttaattaatgaggttgagaatagagttgaaggagattggggtaaatttataagtttgtgtcattctgagagttctgtaagtagctgagttacccatgttgtgactgagaaaaacaggagagagcagtgactgaaggttctgagccaaaggaggagaatagtattgtttattccagcagccagagtggcctgtgtgactgtaagtcgcctgtcaagagggagactgcaaggaaagtgcattgatttgatttggagtagttgtaactgcagcatgaagaatatgatatatagggatgataattgaggaacaatttaatggctgcataccttgctgaagttgaagttccttctggagataaaggtggcaaaaaagaaagtgcttaggtagaagagctttttaaaatgagttaacagaaaacagcagactaaatatggaattgaggagtaggaaatgaaggaaatgaatttgaagatttactttctttcaggatgcagagctggtatgtaatccctctgtttccagtgccttctcccacttccaaatttcactgctcctcatgcgccctggtgtgtggtgcagcttcgagattaagcctccagccttctgtcaggatgaagcagcaggtggctgagatgctaggctccaagtgggggaggtgtttagggctctaaagactttcaaccagtccttgtattttcagccacatttcagtcttcagaggaacctggagcctttcatttctgagacttcttggctacataaactggcatgcgtcttgttagttcctcccactccctgccccaatctccttgtctccccaacatcattaattgagcttgggatttctctggtctcctaagttggttaccagcaggtcattttctaagccaccaaaatactggagctctgatctgttctcatctcctctcctgttttgttaattttcttttgggtaaatgccattttttattcctcttctatcaacctggtagagtttcagggataaagagagacaaatgagtctgctccatctgctgtgtttaactagaagtcccaacacccaaaatccttcacacgatgtgcagggctctgcagtgggcctccccctgcctacctgtcaggccttatctgtgcccactcttcctccttcctctctgagatttcagcaatattggccttctaaggattcttaaagccccaccttcttctctgcttcagagcttttttttttttttttttttttttttaacatgtgctgacctattacgctgctgtgttcttacctggcacgctcccatcatccttcaagtctttgcttcaatgtcaccttctccaagaagcctctcggacctatgtttccctatgtatacagtctcatcacttcctgtgtgtttccttcaccattttaccacagtacatatgaatatttgtttgttagtttgtttgagacggagttttgctcttgttgcccaggctggagtgcaacggcacaatctcggctcactgcagcctccacctcccaggttcaagcgattctcctgcctcagcctcccaggtagtagctgggattacaggtgcctgccgccgcatccagctaattttttgtatttttagtagagacggggtttcgccatgttggcccaggtggtctcgaacttctgacctcaggtgatctgcctgccttggcctcccaaaggctgggattacaggcgcgagccaccgcacctggcctacatatgaatatttgattattatccatctccttcgctacactgcaaagtcaataaaggcagagatttattttggttaccagtgtattccatgtacttggcatggttcttggcttatagtacatgcacaataaatattgaaaggatagatgaaaggattatggatagatgaatgtcttttaagcagttataaaacagttctgcctaaagagtcttttttaatcagtagtattacttcaaatacatatttaaatacacatatgttataaatatataaaatatgtatttaaatatgtcatttgtactattttaaatgtatttaaaataatatatgttatatattaaaataatactaatgatttttaaaagatcaggcaacactgctttgtagctttttagaagacatttatccttatggatccataattattatggattgtatgttttatatataatgaaggttttgggagttagagccctgatccttccgctcttgaagcttgatttaaaggagcatggcacagtggtgcctatatgagtcagccctccattatctggggcagaattcaggccccagaaatggtacttaagatacacagttctcccccagaaaactttatatcggccatttgttacagaaactgctttctcaacaaaccttttaccagggcagctaacaatgagcaaaactaatttgaatttcaactctgccattattacagtgttgctaagaagtagtgagattctgctgaggaaggccaagcaagaggagggagccagaaatgccttaaacaatccacagccaggattttgtgctatcttttatttcacagttgaacttctcagtattttttggttcataacctttttctcttttcctcaattctgagtcttccacatttgtgccatactaggtactttattgcttctctcccttttttttttttcttgagatggagtctcattctgtcgcccaggctgaagtgcagtggtgcgatctcagctcactacaacctccacctcctgggttcaagcaattatcctgcttcagcctcctgagtagctaggattacaggtgtgcaccaccatgcctggctaatttttttgtgtttttaatagagacggggtttcaccatgttggccaggctgctctcgaactcctgacctcgtgatccgcccgcctcgacctccataagtgctgggattacaggtgtgagccaccacacctggccctctccttcatttcttagaagagttttacaaagtcattggtgataaataagtaataccatttcacatctggaaacataacttgatagtaattataaattcacagactgtactttctgtacttatctaagtatgaatgcataattcctgtttatctgtgtgtaggtttatttttcccccatttaagtaaagctctatgttgatgatgaggtttttacgagttgagattttaagaggcctcaaatatatctaaaaaattatagaccaagtatgatgtgttagtgttcctcttctctcagctaattctttaaagatatgttccagaattcctggtctgttcttgaagatctcccaataattctagacttctgaagcctggatattttggcttaatttgctttcaagacagactggatttaaattactcaatttgtctgaagtctcattaagatccaaggttcttgtctgttctagtgagtttgagctggcaagaataatacttgtcatctgaaaagtccattagaatcctttggaggagtgagactggaaaattggagacatattattatattttaaaatatgccacctttctataataggagtatgtggggagactgccttgttttggcttcttgggaaaatttggaaaattagtaaaataggcaggcagtagtagttcaatgcgtattgtatgccaaacactgaatttagaacaatactcccccaaaagcatatgtgctctaaattttatttttcacttaccacctgggagatttggattaaatttcttctgggaaatagagttggtatgaagaaacaaagaccactataccaatttatctgttggaataatcatttagccgtacagctctttccactcataaagttaatgaggtcattattgttctttctagctaatagataggcatattgaaaccttaggcctttccaaaaagtctccataagccattggaaagatagactaaaacactccttgttttaaattctagacctcagttcagtcagagatagtaggatttttgcagtattattaaaaagacagaaaccagctataaaattgaaatgaagggacttaatgttttttttctgtaatatctttggaatgcttccatggctttaaaatgctgaggtgtttctcactatttttcaaaagcatgtaacatgtagatatgtgacgcaaacttgaccagttgttcctcttttctggtgaattttgacacctgctactattacacagagtaaaagtgaaagtcataaaacagaaatacttaccaaagtcaagaaaaatgcatagactaaacaaaggggcaagagaagcctattacttgtttcatgtttcaaaataaaagatgaatggcctatcacttcagtagttggaaattcaacttgagaaggtaggtggtttgatgtttgcccttgttccttacgtttctagatttctctatttataggctagaaccagccctggataaaataatacaagttatgaagagaaatgtgcagttcagcatttttacccttctgaagtgcgctttctcccagctgccatggaaacatggcgtaactggtttcttggatagtctcactcctcttgagttccggctgtgagagctagtgagctcattacaacttggatcagagtcctggaaagtcagctcccagggaaagtggaggacagtctctcatggggcacgggaatggggggctttagctttattaaactgcatacatactttcactacacagtcatcccaagctttagcccaggacagtgtcacattgttcacagctgtattgcatcttgaggtttctgtgtgcatcctacacactttcctaaggcagagacttatctcttccagctgtaagccggagggagtggtgctgcagactcctagcaacacatgcggactcaaacaacacaggcagttaactctcttgagtagtagacttgtagggcaccagaactccgttgcagttcactgacagttaccagatatacatttgtatggcttccgtagcattgtgatggaagctaaacgtttgccctgctactttcttttttttttttttttatttttttattttttttttattatactttaagttttagggtacatgtgcacattgtgcaggttagttacatatgtatacatgtgccatgctggtgcgctgcacccactaactcgtcatctagcattaggtatatcacccagtgctatcccccccactccccccaccccaccacagtccccagagtgtgatattccccttcctgtgtccatgtgatctcattgttcaattcccacctatgagtgagaatatgcggtgtttggttttttgttcttgcgatagtttactgagaatgatgatttccaatttcatccatgtccctacaaaggacatgaactcatccttttttatggctgcatagtattccatggtgtatatgtgccacattttcttaatccagtctatcattgttggacatttgggttggttccaagtctttgctattgtgaataatgccacaatgtgaaggacctcttcaaggagaactacaaaccactgctcaaggaaataaaagaggatacaaacaaatggaagaacattccatgctcatgggtaggaagaatcaatatcgtgaaaatggtcatactgcccaaggtaatttacagattcaatgccatccccatcaagctaccaatgactttcttcacagaattggaaaaaactactttaaagttcatatggaaccaaaaaagagcccgcattgccaagtcagtcctaagccaaaagaacaaagctggaggcattccctgctactttcttctggtatgcctgaatcactgtttgagaatggattggactttggtgcgtggaaaactggtagcagaaggcttattcactgcagtgggttgggggtaggctgaaaagatgtcagggaggattaactagaggcagaatgtgtcatagttagaagtatttagaagggaagaaagtttgaactctgatactgttccacactaatattcatgccctgaaagaatcagatcattcttgcctctcccacttggatctctagctactggaatttgccaattcttgatatgaacgctaagatttggatggagcttgtgacctcatttagaccatttgttctaaatgctgaatagaaccaggaaaataggaaaagagggtagaattggggtcataagagaggaatcgtcgttctttgaaagaagaaagatgataggaaactaggcacatgagttacgaggcagtggagaaggaggattagaaagggaaaaaaagaagagaaactttatgccaatatcttctacaagatgtttggctggcacaaaactaacactcaatacttttgcataagtaaaggaatgagagaaaatttgggattggatgcttatcccctggaaactgctacaggctggtgttaatgggaaagggatctgtatttgaccaaaagtgcatttccacgtctctacatttctttttataaagagtcaaagggactcaatgatgagtgtgtgtgtaagggaactccacactagcaagtacaggaaaaatttgatggtactggtgaaggatgttgcaccaatctggaggggaggacaggaattggtttctcatggattgatgccgcaagacaattcataccatgagttggctgagaccacttaaaaaagtaagcagtgatgactgggcaaaagagacaaaggaagaaccacatcttttaggggagagagagagaaggacaattaaagggactcaactagatcaagttctgctcactaaaggacagcgtccaggcaaatgttaattatcttcaagaagcaatctgtatatatagcatttcaagatactccgagatgcttttaatttattgaatactttttattggtatttatcataaacaagagactcacaaatatatcccagaggggaggttttggtgtagttgactatagtagttattaaataatctattaataaaagcccacaaaatggaagatagaaagatagaaaaacaaaagacaacacaggatggtgttggtatacagaatttatacttgaagtttaacaacacggaacaagaaactttattaaaatattcatttaaagaacttccatatgaatcaccagaggctcttagtaaaatattgattcggattcacagatctgggtggggcctgagattctgcatttctcataagctccaagcagatactgatgctattcttcctcaaatcacactttgactaacaaggactcacacaggttctctgtaattggtgttggtagtcattcatggttagatgtagttgaggactgccctcttaactacctctcggctgccaggttataaagaaagcaagtctcagtacaagttctgtcacttaggagcatttattagccaatgggtacaaaacaatcttacagcctgtgccagagacacagtgaagtcacagttctgtcttttggggtgcttggtgtgagaggctcacagtctacacaggccacagtcctctattagagtggttctcaaagtgtggtccctggaccagcagcatcagcatcacctggaaacttgctagaaattcagattcccaggcccttcccatacctactgaattagaaaatctggaggtggggcctaggaaatctgcatctttaaactatccactccaggtgattctgatgtttgctcaagtctgaaaaccattgttctagcagcaggattccctcaaccatctaactgaattctggcaactaagaatccggtgaaccacagctggacattttggaattcagcctagggcaccatttctaaagatggagaacctactggattcttcttaaactcaatttaaaggcagggagtgtttctaaatgtttttcaacaatcttcatattttgcaaaccactaatatcactacacaggcccgtctaactattaattaggaaaattaatgaaacccctggtgtaataagagctaaatataactgaatcacttacagtggccgcctgtggcatgaggctttttgattaattgctagccaaccacccttggagttcactcctgattaagacaactgaccacctctacagtgtagcttaagctaacacacacatacatcagagtgtactgttcatgtgagggtttttaaagactcttaaaatttaccttatcagggcataatttaaacactataacatgtttccattttaagtgttcaggttagattttggcaaatgtatacactcgtgtaaccaccatgccaatcaagatataacatttcgatcacctagaaaacacccttgtgttcctttgaggtcagttacctactcccaccacaccccaggctaccatctggcatagtagctaagttttgcctgttctagaagttgatataagtgaaatcaaacagtatgtactgttttgtgcctggcttcttttacccagcttagtgtttttcagatcagttcacattgttgcattatcagtagttagttcctttttattgcactttgcacagtagtatcccactgaatgactttaccacaacttgtttatccattaccttactggttggtttccggtttttgactattatgaataaagctgctatggatattcatgtacacatctttttgtggacatacatttttttttattctgtgcaaatatccaggaaaagaatatttgagtcataatatacatgtgtgtttaatttcataagaaactgcctaactggtttcccaaagttgtcgtacattcccaacaagcagtgtctgagaattccagtcgctccatatcctcaccaacatttggtattccggtcttttaaacaaaattgtatgctgaatagtttaaattacagacattgttttctttcccctagttgaaattcaggcttttatgtttggtctctgcgatggccataaagctgaaaatgttgacccaagtgacttggatatggattgaattattgccctttcctaacacctcatcagaattggtttcgtaggtgtcatttgattatggcagtcatgtatgtcagtgtactttttctttctttcattcttttgtttattgattcagttggtcagtcggtccatgatctgtattaaaacagctttttcagagggcagttgcatattaagttgctaggaaaaatgacagaagtaggtgacagagttcttgtcttcaaggagctttttggagctgagttcctgaaataaatgtagcccagtatctatcaaggcttgtgcagacttgagtaagaacatcatctaaatatagcttcctgctaggtggcgtgagtcagggcttgatagaccggtgactgcagaaaccacagtaacatatattgttgttattctgtgctgaacattagaatgattgtaccttagaatatagagccaaatgtttattttattcctaattatatttttaaatacatatcacacacatagacacatatgttggataaaaaatactcaaaatgttaacagtgcttatttaaaaggtttatataaactttttttgtagagatgggatctcactatgttgcccaagctggtcttaagctcctggcctcaagcagtcctcccaccttggcctctcaaagcgttgggattacaggcatgagccactgaatccagccagttgtgcctatttttgagtttatgggcttgtggatgatttatttgattatatatgtatatgttaaatgtctaagttacccaaagtgagcatgtataacttctacagtcagaaaaaatgttatattgccacttgattgtttaaggtcttatagctatttaaataatgtatttcttgttctctttaatcttgtgcagaaaagattcactacagtagatccagattactttctagaaaaaaataatgcctgtccatctctttcctcttgggaacaggactacatgaatgcccttcaggctataccactttagtcttcacagaacttagccttcctggttgtcaaagggcaaaaggaattattttttcttttccccacgttaacagaattttcacctccgaaagcttggcgtatacacactatatgttttctaggctatttttgtggtggttgtagttattggcaaatcactgggcgtcgggggtgggttgtctgttatttctgatggaataacaaatgctctttgttttccctcttttcagctgacctgaataatgtcagattctcagcttataggactgccatgaaactccgaagactgcagaaggccctttgctgtaagtattggccagtatttgaagatcttgatactatgtctttgcttagaataaaaagtaggttgggtacatttttacttagagaggggagaaacagctgtcacaattcctgttgcaatgtataattcattctttaatgtatccttggcctagagtttgcctagaatgttttgttttatttttagaatcattcctgtcaccattcctcagctactgatgttgaattaagatattgagaatttttattttccaactactggcattggcatcggcatccataattacctttgtgaaacttgcacaatccttgttctacctttgtttttttttctttttacaaaatgtacttagtattagaagactatgactatctgatctaaaccaaacttcatagacatgtgtggtttattagcttgaatgctaacgtgcagatgaatgaagtggtagaggaaaaatgacagaattgctttcctccttttttatcatacatctgtggaaaaatcctgaagtgttacacagctctatcatgtcatcaaatagtttatgtataactctactattgtctgagggtctgtgtgcattgatgatatgcccatgaaacaggcacagtttctttttctttttttctgtttttttttttttttttttttttttgagatggagtcttgctctgttgcccaggctggagtgcagtggagtggcgcaatatgggctcactgcaacctccacctcccaggttcaagtgattctcctgcgtcagcctcccaggtagctgggattacaggcatgccccaccatgcccggctaatttttgttttttgtttgtttgtttgtttgttttgtttttttttgagacagagtctcgctctgtcaccctggctggagtgcagtggcgcgttctaggctcactgcagactccacctcccgggttcacgccattctcctggctcagcctccggagtagctgggactacaggcacccaccaccacgcctggctaattttgtttttgtaattttagtagaggcggggtttcaccgtgttagccaggatggtctcgatctcctgaccttgtgatccgccctcctcggcctcccaaagtgctgggattacaggcatgagccaccacgcccggcctaatttttgtattttttaatagagacggggtttcaccatgttggtcaggctggtctcgaactcctgacctcaggtgattcacccgcctcagcctcccaaagtgctgggattacaggcgtgagccaatgcgcccggcccaacaggcacagtttctgctctgatggaacttacagtctaacaagggataaccaggatgttcatgaaatttgtagacataagcaaatatatgtataatgtattaagaatgtctacagttggttaaaaaaataaagtgatcttgtctctatttccaagaccatttcaatgtcatatatttagttgtgcaacagtgggacaatggggtactatgtgaacagctaactgtgtggaatgagattcaaagaatgtttgtttgaagaggtgatgtctaagctaggtaactctagaagagtaagcagctctctctctaggaagagcgttctagtcagaaagaagagcatgtgctgaagggcccagagaaagcatgacacattcaggaactgaaaatatgtcagtatggctaaagcacagaattccaggggaaagatctattgtgaaataataggctggagagagaagcaggaagcagattgtgcaaggtttttaaaacccaagttaaggaatttagaggtcaggggatttggcctgggggtgacataatcagattgtcgcttagaaagatgattcttgctgtggaacagagtatggattggtgcgatgtgggagtgacaggagaaaaacctgttgcagtaatctaaaccagcaatgtggtggcttgaattagcagagtagtaagggagataagtggagagaatttagaaatatttaggaagtggatttgacaggcctcagtgattcatttgatgtggtgcagggatgtccaatcttttggcttctccgggccacagtggaagaagaattgtcttggaccccacataaaatacactaacgctaacggtagctgatgagctaaaaaaaaaaaaaaaaaaaaaaaaatcgcaaaaaaaaaaaaaaatgttttaggaaagtttacgaattcatttgggcctcattcaaagccatcctgggccacaggttggacaagcttgatgtggtgggtgaaagggagtcaaggaagacacttaggtgcttggcttggaatatcaggtgaatgtgggacttgtctggtaaggttagacacggagctgtggtgctcaggagaaatatacaaacaacgtttagggatcatgagcctgtaggtgctgcttgtaacgggggagaggattggatagctccaggaaagtgtagcgtgagaagggaagttatttaggacacaggataagcaacctacagaagggactgcaaaggaatggccaggaggaaagaaggaaaattccaagaggttatgatgccacatgctccatgggaagaaagaaagaacccgttaccagggtcagatgttgctgggatgtcagcataaagttgcggaaaatgcccattggacttagcaacaggaaggtccctagtaactttggtgagattttagaggcacagtggaagtggtgtggtgagttcaaaagtgaaccaaaagtggagaattagagaaggtatgaatgattcttggagaaatttacttatgaaggggagaagagtggggtggtagctagttggagggggctgaggagttaatggaaatgtatgtacagtcacgtgttgcttaacaatggggatatgttctaagaaatgtgttgttaggcaactttgttgttatgtcaatataggagagtactacacaaacttagatggtatagcctagtacacacctaggctgtatgggatagcctattgctcctaggctatacacctgtacagcacgtgactgttctgaatactgtaggcagttggaacacaatagtaagtattgtgtatcgaaacgtatttaaacatagaaagatacagtaaaaatatataatagtgtaatctcatgggctcgctgtcatataggcagtccattgttgactgaaatgtcattatgtggcacaatatgtgtatataagtgtgtgtgtgtgtgtgtgtgtgtatacattgatccttgaacaacatgggtttgaactgcttgggtcaacttacgtggatttttttcaatcaaatgcaggccaaacatatagtattcgtgggaatgtatttatatgagtatgagaagacagggtgagattacaattattggcccaagaggagatgataaataatgggtgttctcagagaatacgggcaggtaatccagagcccaagggagggaagagatacctctcttccactgtaatgggtggggtagagggaaggatctgggcaggtccaggtaactaagaaaccaggtagcagcaaggtgaaggatgtcttactataaaggcttccattttttgtatggagtggagagtccctgcaacgcagttaacagcaggagatgatgaagttgggcttatctttgtggagaataagagagagggcggagttgaaaaccagctgtgtgaacccagaggcggctgagtgtttcacggtagctccaatctgcaggggtgtggtatttccccaggcacgcttagcacttgggagccagatgcttctgtcctggggtagggagggaacagctgggcaagagaagtgaggatttgggcaaaagattgattaaaatgatactgacaagtccctgttgggtaggagaagctgtgaacgcatatggaaactggtaattaggaggtagagggatgaaaatgctaactcttcagggaggtaggggaagaagtagtaaaggaactgaaggtcaagaagttgtggtcagagagaatcatagatgaacattattttgaaggtggaacagtttcaggtgattagatctaggatatagccatttgagtaggtggcagaggtagagtggatgtgaatttccatggaggtgaaatagcaagttaaggaactgagaggctagaatgatgcatgagtcccccatgccaatgttgaaatcatgcagaattggagcgagaactgggcaaaagagaaggaccgtgaaccctggctgccaggtcttcagaaataaaggggttcaaccagaggatctgcagaggctagcaataagatagtcaaggagtcacttggcatatggttcttacacagagatagagaagaaatgccttagaagtggaattatttggaaagagagactaggccttttcccttcatcttggtatccccaatgcttagtacaaaacctggcacacagcatggttcaatatgttttcatgagatgaatgcatgaatgaaagtaaaccaaggcttccatttccttatagcccgaagttatcatttttcagctatatagttgccaagtttaactggtgtttaaagggctttccaggtcgagggtttccttaggacctgttaatacgtcatagctgggaaaaagtagtttgggatgggatcgagtcagggggctgaatagagaaagttttcttgcctctttttcttcacctgcccctgcccctgcccctgccccatcccagagctactgctttcctttaataaaggagtaattaggcactggttatcatgaagtgctagagaatattcctgtgagatcctaaaagttcagaagctaaccatttgttccagtttatactatggaaaaaaaaaaaaaagaaacccagaaatagaccagatggaaaaaccttataatgactgttcctttctataatgtccattttcaccctggatttaggcattattcgattttcctgctcaaaaaaaattccattcacatatgtgttttattgtctgtcatttcaacttataatttccaataaactttgggaaaatgggggaatttcataatatacaaaattttgtccatttgaggtgataaccttgtaataaaggtaagctccgaatgtagaataatttctttaaattttcacttttaaatcaatttgaaattctctgcatttcctttctgagcatggcttttctaatatgtgaaaaagattcaagtatgccaaaattaaggtgtatgtatctaaattaagtattgaattctcattaatgctaggagggtgccatatatagtaaaactatagaatgaagagttcaccccatccttttattgaacatatgtgtggtcacattacttactttcaatatatgatttaagaattttctcctaattttatatttgcttagatttagcttccaggcttttgtcatttctaagcctgcaaagccatgataaagagctattgtctgcggtacaggcaaataaaacttgccctggctagctttccctaccaaaggccacttctaccaactctaactttaaggaaaattaatgatgttatctcagtgatttcctggtgccagtgaagagtttgaattacagatgccttggaaatatgcacttccacctctattaagcacttgatcttatttttttttcacttccctatcaatgtttccgtattgcagaaagccaaataacccaattgtatccactatagagaattcactatttaagtggagagcatcaccgttggcctataatgtccccagtttgtaatcagttaagtgttgcatgactccttactgcctctcaacacattggaaatgaaaatgaaacttggtagaaaagcaggaacaaagataaaatcttggtaagaaggatttataaactgtttcatatagctgatactccattgaaagttatgaagaaggtaatttaagcattttctttctccctttgtagttctgatgacattctacaggtgtgaggcttctaaaattaaaaagccaacttgtaagagcagaaataaaaacgcacttaacaaagcaagtgtatttagtttattaataatgtgtggtgggttggagagagcccaaaccatagggctaaatatactgcagttgataagtgtgacaaatattctgcaaacagtaagaaatagagaacattttgcctctattcagcaactaaagcacacattatagagatttggtacaggctggagttgtgtgaatagtcacagtttctggactcgccctcaccatgacaaaccaggtgaaaaatgcaccgccttctctgtaaatgcacctcaccttttgatggtgcgctaagggtgacattagataggcttcagttgctaaagaagactctcaggacccacaataacatggcttacaaatccgcgctctattgccagaaaaggctacattacaagagcattactgtcaggatatggatccacagccacaggctgcctccacagcaagggggtctcgagaggccagtgtaattattttgccactgtcctacaaaaatctactttttctatataccatgtattatttttcacataggttagaggccatgtctctgttagttctgagtttaagacgtcttgaggacatggccaaactaattttctcagtttatatggtttgacagatattagtgcccaagagaggtctcataacatgacccatctatctcccaggggaaatactgtaatcttgtttagctgttacccactagggaaagaatggttttctctcagtcagatgctaaagagattaaagaacacctcgtaggttccgttttctagtaattattggttccattctccagctatcaaccttggcagcttgccatccctatccttcctcctggaattggatgcccttgaagtgcgcttcttgcactaggaagtctttctcgtcagtttatcatttctcattcaaagcaaattctacctggccaggtatctctagcccagttcctaattctcctaatagaagtttcttttatttcaagtggattcatgccccttggcccaccagacatgttgccattgagaaatagcagctttaatgggaaatacacatgagacacaaaaatgtgactaggctaaaatcatatgaatagtagtcactcctaaaaggactttggtttgggtatgtcacagaaatttctgtagccatccatatccaatttctagcttttcagtctcaggaaagtaggcccaccaaattcaacttaaatatctgtcactgattcaagctgtcccaattgtccctccacccactaatggctttccacacggagtaatggggcaaatagctatttttttaaacacataatgttatgacagatgaaacatacagcacgtaagccttctatcacatgcccaatacctttgttaaaccttcatcatcacaattgatggccacacagtgtttattgagattgttataaatcattgttcttcagatttgactgggtaaatattccctcaggttatttcctgacacagctgattaataacagatatgtcctgtgaaagaagaaccaaaagacattaacgaatactaaccaaaagccacattaatattgctccatggtgttgtagtcgcagttagaacgcccatctcgtcatccagtgtgttggataggttggctgactctcccactcacatcttggctctttcaaggaggaggaggttttagcagagtcccccaccccaagaggcatctgagtctaagccaagggagcatattattctcttattttaaacctctccgtaggcagcaacattatattaggttttccctttaaaaaaaaaaaaaagtatcggctgggctcggtggctcacgcctgtaatcccagcacttcgggaggccgaggcaggcagatcacgaggtcaggagttcgaggccatcctggctaacacggtgaaaccccatctctactaaaaatacaaaaaattagccaggcgtgatggcgagcgactgtagtcccagctactcgggagtctgaggcaggagaatggcgtgaacctgggaggcggagcttgcagcgagccgagatcgcgccactgtcctccagcctgggtgacagagcaagactcggtctcaaaaaaaaaaaaaaaaaaaaaagaaaaaagaaataaaaaagtatctttggtggtttccttccccttgcaacaatctcacctttttccttttatcattaattttaagccaaacctcttccccagctacacacacacaccacacaatgcagacagtccccaacttgtgaagtttcaacttaacaattttttgatttcacagtgatgcaaagtgatatgcattcaatagaaactctacttctagatttgaattttgatcttttccaaggctagtaatatgcggtatgatactctctccccttgctgggcagcagcactgaacctcagctcccagtcagccacaagatcatgaggctaaacaactgacactttactgtgtaaggtgttgctagacagttttgcccaactgtaggccgatgtaagtgttgggagcacattgaaggtaggctaggctaagctgtgagtttcagttagttaggtgtattaaatgcatttgtgacttaagatattttcaacctatgatggggttgtgtgatagcttcaattaggcaaggcacaaggaaggagtaatccattccattgatccttgtggaatgcttgtgcttaagtaccaactaatagccatagtatcttattttggaatattaccagcctttgaaactcttaattgtagccccagttcagggactactaggtctggcatcaaaaaagaaacctgtagtgacatagggaatacctgtaagtgccccacttgaattatctttttaattgtaactggtctcacaggtgtagcccatttctcaaaaatgatagttgcttcagctttttggttgggactccacctgcaggccagagagggtgaagcccagtggaaagaaattctgaacttaacattagcttttggatttttttttagcagccttgccatcagtttgcaattgcctcctaatccattttgttagctccttaggttcaagttctctcacttccagattccactagaaagttacaccatcagtaaccaatttcaaagcctgtgttacttttcaaccaagcgtagcttgttgagcaacttcaaaggttctttttcatcccttttatcagaatcttctttttttctttctaaataatgcctcagtcatacttttagctaagaatgagttggaggtgttctaaacaatcttgcttctgacactcactgccctgacagtggaagttaaacagggttcaattgctaaagaggactcacaggaaccaaatgacagtgcttacgaatctagagttccttgcagaaaaaggatgcaatatacccacaacattaaaacaagaataagtgtcacagccacagcctgcctcacagcatagggtccagagaggacaggtgcaagctataattgccctctgtctgcaagagccacaccacgatgcattttctctcttggaacaagagctactgatgtgagcacagaacaccttggaaaccagggagcacaaattggagtttcagccagggtttcttatatcccgtgggtaacctaggcatactgttcctatgtaaccagcctcaaactcagtggcttccgttggtctgactgtgcccgggtaaaaatggtcaatgttactgttagcaataaacaatggtgataacctgcaacccatggctacacttcaacacagtaagtcactttgaaaagcaagtgctttgaccagggctctgcactgtgtagatattttagcaagtcatctcgtgccaactccagcctctctggaattaacccttactgcacagacaactacatcaaagtgcattgactttcttgaagtgcaaagatttgcttgggaggtccctcagccataagtgtaagttgcctgtagagtggcatgcctgggcaagaaaaatcagcaaacatacagcagttcttccaccattactcacctctttctgtttctgtgctaattagatcacagaattatttatacatcaacatagaatatacagattgacctataggatgaacttggggttatatgggcaccatgagactttttttttctccactaaccaactttttggtgcttctgttttatcctactgttgtcattagcatggaatgcagaatggttttcctgttctgtaaagtcagtaaggacaccttctgccacccacttttcccccttacaatatgtacctccatgagaaatcagaaaacctagatatcctgccataacacccagagtgagtctccatatctctggtctcagttgtctcaactgcaaaatgattttaaagcaaccttctggctctaagagtctatcactctgtaaaagacaaaaaaaatctgtcttacataggaaggaatagcaagagttagctactgtggcatacatagaaaggaaaagaatgagcttttgaagctagaaggttgagaagatgattaggcacaaccagagcctcaggaaccattagtgggatccctgtgttgaagtcctgcctgctcgccgccccccaaccgccactgtctgcttttcctgcacagcaaagaggatcctggagagtcagccatttcttttatcctgtccccaccctctctcacccccacagccctcatgcatagggtaccaccacatggtccctgttcttcaatggcttcaaagcctatagcatcctctactgtaaacataatttagaaagtgaagatgtattagaatacttgggtttttatgtagctttaaagatatatctactagtgaatacacacaaacacacacacacacacacacacatacacacacacatatatatatatatatatataatatatttaatggaaattcctagcttaaggaaacaatggtttcacacaactgtatctgctggttgcttattgagggtcctagaaagagctaatcattacatttaatgtttcatcaaaaagtctaggtgtgttctctaagatgctcattttgaaaagcatatgcatggcaattaaattgtccctattgatattctcacctccttttcgggtccatagcatggattgtgtatacctaaatggaaattttttcaaaatagctccatgaaagttgaattctgtttgacatgtttgtttagggaaatgtgctcttcagtcttctgtgatggattgttcttgtgtttaaccacatccagttttagcagagcacactgcacagtatttctctcctaactgtgtcatcttctgctcctgtaatttcagagcaattgctttgctcccctctggagctatttctactcaacatttgctgttctatgtgttacccattcacctgtacagagataagagcaggccccataaaatgaaatgcatgcagtttttctctgttcatttccatcacacggctaaataagactcttaatacaaaagtgattcgaaaaattttcactagttacttcttaaatgcctggatcagaggcaaaatatttatgatgactaaagcagagtaacaaaaaagaaaataattgaaaaacttcaaaccacccatagcttccttcagtatataaggaaacatgttgggaatattggtgtttggaagaaatccattcctctcttccagtaatggagctggcataccgtgtttctaagtgttcctactacgtgcacttgagtatgtgccctctgaggaaaacaagcacacagaagagagagagaagaaaagtttgagtcttttgtctctggacctcgctccagcctcccacgcagtcttctttcagccattccctcctcacgtcctcccgtcctcctgcctccttgcattgctttttaaaattctttattatttttctcacttgattcttcagataagtctcccaagttatcttccttcctcccactttaaagaaagtctcagcttccatgaaaagggtcatttctctatctttagagtatttcagagcaaaaacagaggggccttcccttccaagggaggagtgcagactcctgcttccaccaccatgtctgtttcatgcttctggggaaactccaggattttctgttttcctttttttaaaagagaaaaatgtgtgcgcaatataggtggaaaagtatttttgcacaaacctacataggtattaaccactatttttgtttttttcttaatatttaattagaactggccatgaataacttgtaaaatatactaaagccttaagtttgcatttctttattactgggaaaggtgtttactgagcgggatttacctctatttatgtgaactacatttataattgaattgccccttccccctagatgcatgagagatttacttaattagcattgattccttgcctcaaaggactgagaattccaaccagagcttaggtgtataaggtagtataaaagcaatgttgttgtgtttctagtttggctaataaattggctttagagaaatgcatcttttcatgacacttgggaataaagcttgtgatttgctgatgttggacaaggttgaagtttcacttttgttaaatttttgtccccagcataagattaaacacctcctcagatcaagggaattttcctccctcagccttataaagttgttagaggacttagaaagaatattatgaaatacaatttgaaggtgaaaggagaaataagcgagcctcaggtctgaaaactggatagattatgcaattactttagtttgcctatagaaaattttagtggagagtatttttttcacctaatattagggtagcagagagatgctgaggtgactgatatttcaaggagaaaagcgcttaatgattataaatgcatagctagaaatagagtttacacaaccttagccatacagattaatctaacagatcttctctaatgctaatacaagaaagtatcatcggatctctttaaaaatttctgctaaaacattttttttttcttattcaggtgacaattgactctgtttatgtagaacaggctaggtccccttaactctcagatattccccagtaatccaaggatgggaattatatctttgcccatatcttcacccaatgccagtgagatttaagaacaacttcagatcctgaatactgatcaaactcatcaacttagagtcgaggcataaaaataaaacacctttcaaagagagtgtggttcacgtttggtgtttattaaagggtatgagagagtcctagctaggattctcagaggaaaaaggacactgaaaggaaggttttactctttgagtcatttgtgattttatttgttttttgcagtggatctcttgagcctgtcagctgcatgtgatgccttggaccagcacaacctcaagcaaaatgaccagcccatggatatcctgcagattattaattgtttgaccactatttatgaccgcctggagcaagagcacaacaatttggtcaacgtccctctctgcgtggatatgtgtctgaactggctgctgaatgtttatgatacgtacgtatggcatgtttttatttcccgggctctgtcacaggaggcttagcgtacagaatggtgaagtgtaattagcattacaacagggccctggaagctgtggacctaatgctcttcctgtgataaatcatttttgcatttatgacttgaaaaatattttgataagctaggagttaagagccagaatgtagattgctctcagattagaaaacaaacaaaaccctgagacactcattttgcaaatagtggaatgagtcgacatatagcctttggttctttccctttctcgcccatggattttggaattcttccatgcacttcaggggtggcttcctctcactggcggccatggctgtgctcctggagatactggcacacctgtctccagatcagaatggtcttagctgatacttaggacacttttgcagaagattatgaattgataggccaaacaaaatgaaaacaagcccttaatacagcaaacttagcttctcaaactgagaacatttttcgttttcttttgttttttaataagattttatgaagtttcagtttggcgcctccattcatcactctctcttagagaacaattgtttgttttggattgcacacaagggagatatccccagttctgatttttttttttcttgagcttaatgaagacaattgaagaagggagcagaaggaattggtcttaattttgcctaaattcttcttagatctcaaaattattacatgcctcatttcaccaatcaagaacatactcccatttggaaatctgggaaggttttctgaaaagagttgcaaaacaactgttttgccttttacctttgttgtagacttctactaccttttgaactaaaatttatacctttttttctttcttattttgataaggtattgctttttaaaatttcaggaccacctgactattacattcatcatagtcatctaccaagtccttgaacatgtcggatttcaattgtgaactacgttcacattagttttgataagagtttgtattcaggtttcccctcaaatatattttggcactgttttctttgcagatgacatgtgaatgcattctgaatgtataacttccttctacctgactgaaaagtatttggtgacaattttaactccttgaagacctgagttgctgtataaagtggatttgttaaattttgatctaccttttcttaagagggagaaagataagaaaattttccagtgataggaatttgtttagtccattagtgcccaggatttctttttgactgagggatttaataaattttagtagctggaagttgagcatattgttcaccgaaaataaccgccattgggacctatcctttgtgattttgaagtgctaataggcgaattattctgaaatattttctcctttttctttttaccaatatctaagggccagtagctttccgtaataaaataagaagccaaaaaactattgaaagacactttttaactttaattttaggtttcggggtattatgtgaaggtctgttacataggtaaactcacgtcacgggggtttgttgtacagattatttcatcactcaggtattaacccatttatgcctagtgttccattattggaacactaagcttgtgggaattattcctatcctactgctcaaggtcatcgccaaggtctgattttcacaaaaagtaatatgcagcctccagcataaatgggttaagcgcagtacccaacagttgtcttttctgctcctctccctccttccaccctccaccctcaagaccccagtatctgttgttcccttgtgttcgtgagctctcatcatttagcttccacttagaagtgagaacatgcagtatttacttttctgtttctgcattagtttgctaaggataatagtctccagctaatccgtgttcaaaagacatgatctcattcttttttatagctgcatggtattccatagtgtatatgtaccatatttctcattgatgggcattcatattgattccatgtcttgaaagacattttctacaaaatggaaaacttttcattcttatttttcctttttttcccccatggataaaattagcttattaataaatttgttatgtgaaatgctttatttcagttttctatatgcaaatatagaaaatgctatgcaaataaaagcaatctatattaaaacactgatatagcaacaggttatttataaatttattttttagatcatatatttgaatgttgtttaatagagtatgatatttttcttacggagataaacatttatattctatattatgtgttatgtggcctgaagtaattaattttctttcaataaggggcaatctgatgaagatctgagcatttaagagggctgagcagttagttgctggtaatttttttggcttccatgaccaaagtaggtaatttgctttagtaaccaaagtagattggtgaagattagtaattcttctgcttaccaacttaaaccaaggtggctttccataggtgaatagaatttttttttcttaatttatgtagaacttttgcagttcaaataagggtttttaggaattgaaacttggtaaacattcagtggtcaagttggttgaatttccattgcattgtaggtcatcagtcaaagagataatgaatttggaaaagttcaaaacaatcttaataaaacagtggtcaatagagttcacacatcattgagcactttactcctttatttttccttttcaaggctttattcttaactagaagtgtttaccctctaggaaagggtcagtaattgttttctgctttgattcttcataataggggacgaacagggaggatccgtgtcctgtcttttaaaactggcatcatttccctgtgtaaagcacatttggaagacaagtacagatgtaagtcgtgtatattaatgctgtattcttttattaatgttggctaattaccctagttctagatgggaaatgacagactgttcttatttgacagcagattcctcatgtaagatgtagaactgcttttagagtgtcataaaatttggtttgtgccattccttgtcaaacattaaattgcaggcatttaagtagagaatgaggattagcttttccagtccaggtattattttacattacattgactgtgtctgaataaaacacatgttcctaggggataaagtctgattttctaacctctttctgtaagtcggaaaaataagtgtgaagatttaatctctgcacttgtctagtctttgggttcttatttaaagaataccatgtgacattcatgttcaagaaacattgtttattttataatcatcttactgcaagttgtactgacacatccaattccgtgacgtgactaacattttattatttgagagacagatagcttgctgtttcttaaaggatagatacgtaccaccctacagaatttccttttgattacgcattgggttcttctgcttaaaaactgtaaaaccaaattaaaagccaatgctagaggagtgatggttcagatgaccaagtgaccatccattcatattgtgaaaggctgcagttggttttccccttgaaatgcttataagcaatcttttcagtaggaatattaaacaaattcagcctagcttgtcttttctctcttcccctgaggcctagccacacatgtgaggagatgtgctaagcttcaggacaggcaggagataaaagccactctgtctcctactgatcatttctccttcaggagtaagccacaaaatacacaaaccattttggccctcacttttatgtagtttccacttgagttttctcatcctcagaacgagagaaaaataactgaacagcttttgttaaccattttaaaatgtatttcggatgagatgggatacctgtgtgcttttctcctttaaatattgtagttacttagtataggttaggttctaatctaccgtatatatggtatagtgacagcacattgtaaatataatattaaattgaataattgaggaagctttgagttggtgtttcgaataactactaagagggaacatgtttttaggttggtgaaacaaaaatattaaatgcaaaatgagatgtttgaaagtaactcataactttgaaaataaacacctaggtatgtatatcggagagcagataaaaagctgtgcgtacaatctcaatttttagtgccatcttaggtatcctgttaaaacatttaatttcctagagtttaaagtgtgcttatgggtacagaaagctttcttggatttactttttttgaggggcaacttctaggtgaatataaggtatgattaaaattttatatctgagaacaaaacataacattgcaagcattcagtatgttcattcattctgttacatatattgggcacctactatccaccgggtactgccattctactgtagatacttctggcacacaactgaccaagatatggttccttccctcaaggggatataagtctcctgccaaaaacgatagacacatattgaatcaatgccagcataacatgatgtgagctattaattagaaatacgcagccaggcgcagtagctcacacctgtaatcccagcacttagggaggccgaggtaggaggatcacttgaggtcaggagttcaagaccagcctggccatcatggtgaaacacgtctccagtaaaaatacaaaaattagctgggtgtgatggcatgtgcctgtaatcgcagctactcaggcggctgaggcaggagaatggcttgaacccgggaggcagaggttgcggtgagcagagatcgcaccactgcactgcagcctgggcgacagagcaagactccgtctcaaaaaacaacaacaacaacaacaaactatgcacagtatcctgtgggaacacatacatgatggactagaagctcagtgatcttatgactccataaagaagtcccaactgtggtacatttttgaatctctggtgtccaaggagggtggtgctttgggccagttatatgtctcttaatgctaaaacacttattttttgatgtagttacatcctatatacaataattcccaaggattatgttctggcttagaagaaatttaagtgtcgagggtacgtgtaagcttgcgcttcttgcagtgacacagtttatgtaaaagttatcacacttcatatatatacagtgatcattaacttgattcataaaaataataaatatccagattagcacaaattagaagtaaccccactctgtggaaatactggctactcttgagaattgctactggaattgagttggatgtcaggttctgctggcatccatgggtgctgtgttttgactgttgcaattttcttcttcctttgtagaccttttcaagcaagtggcaagttcaacaggattttgtgaccagcgcaggctgggcctccttctgcatgattctatccaaattccaagacagttgggtgaagttgcatcctttgggggcagtaacattgagccaagtgtccggagctgcttccaatttgtaagttattcaccttctaggtaacatatttattctttcatattttagaaattaattaaaaaacccacagagcttcgttttctcatattagctcttcagtaggcagtaggtatgggatttgggatatttggaacctctgtaagtaagcagcttctggaactctaggttttgggaaagaagacagtgctgaggaaggaaaagaaatctccatctgcagcagggaccccacagttattgaggtgctagaggggaagaagttcagcaagggaggaaataagtctctagccacagaaatcctatgtatataagaaaatggcctttgtaggcgagtctcttagtctctgagtcctttctctaattctatcattatagcctcctttcaatggctgttggtaaattgttagcacagctgtccttttttttaaaactgtcctttgtagctttgacattcccctattattccaaagtctagaggtgtatactctctgctaatgtccatcactgactgaacacactcttgtccgttctctttcctatcctgtcccattgctttttctctgtcgtagtcagtgccccagaaacaccctcttcttcccaaatgcctgagcactccactggtagacattcatcttgttctaatttttttttctctttccttttttttttttttttcttttttgagttgcagtctcgctctgtcacccaggctggagtgcagtggtgagatctctgctcactgcaacctccacctcccgggttcaagtgattctgctacctcagcctcccgagtagctgggattacaggcgcccaccgccaccccaagctaatttttgtatttttagtagagacagggtttcaccaggttggccaggctggtctcaaactcctgacctcaggtgatccacctgcctcgaactcccaaagtgctcggattacaggcgtaagccaccgtgcctggcctctaatttttattaggtagatagtgctacaatgaacatccttatcgtttagcttttgtctttgaagctttctttataggatcaattctcaggcgtgtgattgccagacaaaataatataaacattttttgtggcctttcttcaaaagttgttctaattgtaacgctatcagtattgaaggagtaagatgctttcggtatcacattattcacagtgttcttatgtttttgtttttggttttttcaagtgctaagagctgtttttcttatgtagggtttctcaatccattctaattctattaacaatggctgagatttacaaaatggaactagctgtagaactaactgggttatatctgaagtctttgaccacagactaggatgaaactatagaaggtttcctgggcagatcactgtgaatatttaggtgtttaaagcagtttgagtatttatttaatagttagttggatagatttaccggatgcacacataataagttcatttatgtaaagtgggatatactgtttgaattattttgccaaaattatggcaaattagttgtaaatgtaaaatgcatgtggagaaataaatatcttttcctcctcatacccaaaccttccaaaatgcagatagatgatcaatccaatcaatcatcaaaatgtagacacaagtaacttccatacaatgaatattaatggccacaggcaatctaggttcattttgattttttaaaatccaattataaaacaacttgccataaacgcgagttatttcctaatcttttggttgtgtgttttttttgttttgttttgttttgagatggagtctccctctgtcgcccaggctggagtgcaatggcgcgatctcggctcactgcaacctccgcctccctggttcaagcaattgtcatgcctcagcctcccgagtagctgggattacagggtgcctgccaccatgcctggctaattttttgtggagacagggtttcaccatgttggccaggctgagctcaaactcctgatctcaagcaatccacctgcctcggcctcccaaagtgctgggattacaggtcctaatcatttttcccctttagtcaagtctcagttactctttgagttctagtgaaacacacacacgtgttcatatatagggatatataaacatatgtgtgtgcattgtgacttgggttaaaggtaaggctcagtgatggtccctgctgcaaagtaaactaggctgtattcagggccagctggattctttgttttctcgcccgagtactgactcatcaggaagccaccaccatcctcactgcagcctctggccctcttggatttggttgtcaggataagcggtggccatacagaagctctgctttccctgggctgccccccttatcaggagaccaacctattccatttctgcctgctacatccttttgctggataacctcctactcccctaagcccatgtctctggtttggttacatttctgtctctgtaataacaactctgtattctcagtctcaaagctttgaattcagtccatccttgcatatttgttgaatgcctcctggttggccagccagtctccaagctctttgaaatgtgaaatgtgttttgttttgttttcagaaggggtctaacttcgtcacccaggctggagtgcagtggcacgatcacagctcattgcagcctcgacctctgggctcaagtgatcctcccacctcagcctcctgagtagctgggactacaggcatggaccgccacgcctggcatttttttggtgtatgtgtgtgtgtgtgcgtgtgtgtgtgtgtgtgtgtgtgtgtgtgtgtgtgtgtgtacagggtctctcgccatgttgcctaggctggtctcgagctcttgggctcaagctgtccacccacctcagcctcccaaaatgttgggagtacaggcgtgagccacggcatccagccttgaaatgttttctatgagactggggggaaatcagtcaagatatgaatggtggtaacaggtggcttttgattttctctgtactatttttattttctgagttttcttctttgaacatttataattagaaaaaaaattagtaaagtgctgcctctttttttagggaaagaaacatgttttgtttgattgctttccattgccattcttacattgtttccaggccttctcatcattgcactggcttcctagcaagcctccacttcacactccagtccttttcattggtcttattgccctcatactagttttagagaaaagcatttcccatatgatgccgtccttgaaaatgtcagtatctttctgttgtctagtgaacaaatcctaattcctctatttaactctcagacctttcctactctggtttcataaccacccatagtttgctttcactatcatgaaacagcttctccttaccatttgtacctattatgcttataaataatattgttaccattgctactaacaaaactttgttcacatgaattctctcatttaatcctcaccaagtctttgaggggaacagaatagtcaggctttggagattttgcttttattattgtttaagtggatgaataatttatttgcgcccttaaagtccctcagctggtggaagggtttgattcctagtccagtatgcccaccgccacatttactacctcattcccaaatatgtagtttctgatacttctgctctccagcttcccaaggccaaacaacagctacttttcctgagtcctggatagaataagaaaaggtataacaagacaggggacccttgagggggaagaggaattagtttgaagtgctggcaaatgtagtatttctaatcagatgctagtaaattccatatgtatggcgaggctttcattacttagatttggggagcctctcagcgttttagcaatttgcaatcaggttgaatggatccattgtaaatacttaggaatacttaggaatccacgtcctggccctggcatgcttttcctcggccaggtgcactggcggtcaccttgcctttcattgtgccacgtgcataaaaatacaatgtttgctgtagggaaagataacaggagtgaaaatgtcctctgccctttgtttgaagtataggaccttcagaatgaggctgggctggttccttcagcaagcttgtgctcaaaggctgctatttctaccagcctgaggtaaacggtaataaagtacttgtttatcctacaagtgcattccttgcattgcagatttgatttcctttgatttcttgtcaccacctggaaaccttactttgtttcaggttggtacagttagaaaggtactgaatcttctgattcagacaagggcccagtagtggcaagaagagaggtacgtgtttgtgtgccacactctctggattatctattaaaggttttctcatatccctccccactaaccacttagaaaaggaaatcacctatcaggtctaaatgtaaaattttgcttatttaaaaatcactataggtcttccaaggaattatccattaagccaggaaatgaagtcacatccatggatatgaaaaaggaatagtcactgtaaatttatggctttgacagtggtatcttcgtagatactaaatgaggcaacaggatatgtttccacattaatagcatattgcagtcaacacatttactgggaaattgactcattttggtagtgatagaagtaaagttttgcaacgagtttaagagatacagctgtaattaatatattgccagcttgttcctttctcatattccatggaaacagccctgttgagagattagattgatttttacgaccttagtaaggccaagcctgccctggcagtgagtcacatagactgcctgaaggaaccttgaggattttctgcacctctcctttttcagatgagaaaacaggcccacagtggcacaatgaatctagtctacatcgtgcaatttacatcatgttatggcttcaaccagttcggagactagattgaaatgacagagtgttaatgtgtcaatgtgatcccctatatgaattttagattgtaatagaatgagatagataaataaacacccctcccccaaaacacatacatgcacacacacccatctttattgaaaatactctaatcccaacatagctgtttagtctatcttcagataaaaccaagtatcacttttaggtgggaaaactatacagtcatgtgctgaagaatgacgttttggtcaatgacaggccatatatactatggtggtcccataagatcaacgtaagaagagattataatggaactgaaaaattcgcattactttgtgacactgtagccattgtaacatcatagcacgaagaattatttcacaaacctgcactgccagtcatttaacaggtaaaaaagtatgttttaaaatatttttaattattatggacacataatagtactcatttatgggttacatgtgatattttgatacaagcatacaatgtgtagggtaacacaatcagagtaattggggtgtccatcatctcaaacattcatcatttctctggtaggaacattcccatttcactcttttagttattttgaaatatacaataaattattgttgccatgcatggtagcacgcacctgtaggaccagcgtttcaggaggctgaggtgggaggatcacttgcgcccaggaattcaaggctgtaatgcacaacaattgcacctgtgaatagtcactacactccaacatggacagcatagtgagaccctatctgtaaaaagatttaaaaatatattgattactatagtggccttattgtgctaccaaacactagatcatatttcttcttactgtatttttgtacccattaaccatcccttttttatcccccgatcttcactacatttcccagactctggtagtcatgattttactctatctccatgagttcaatttttttttttttttttttttttagctcccacacatgagtgagaacatgggatacttgtctttctgtgtgtggctgatctcaacataacgtcttccggttccgtacatgttgctgcaaataatgggatttcattttttatggctgaataatattccattatgtgtttatagtacattttctttatgcattcatccactgatgggcgcttaggttgattctatatcttggctattgtgaacaatgctgcagtcaacatgggagtgcagatatctttttgtggtttcgattttgtagtatcttcttcagtaaacattttaaggactttattgtttagataacgtcaagtataccaactttatattcaatatgcttcacctatgagagctggagtgtcaaaatctgtttattttacatctgttttctgcctcctgttgtacttagtattccaaatgagtaagttgcttttccatctatcttctgaatttctctatttgtatgacaaaaatgaataccatctatgcacagttgttgtaataatgtagaatgatatgaaaatgagaataaattacagtctcaactgttgagaacaagtatttctctgtgttagaaacattcccaattctactcttttagttattttgaaatatacaatgtattattgttgccatgcatggtggcatgcccctgtagtcccagctactcaggagactgaggtgggaggatcagtaacacataaatgagaaagcattccagaatatctggagaagtgactggcagagtggttaagtgcataggctttgaaaccgaactgtgcctgagtccaaatctgagctctgctatttgctggctgtgtgactgtggacacatttcttaaccttcctggcccctgaactcctggaggtgattgtgaggattaaatgaaccaatagaagcaaagcacttaagagctgtagtggatacatagaaggtgcccagtgaatgttagctatgattatctaaagtgtgttgtggcatgaaaatatcctgccaatgttaacagttgcttttatctataacaaaacatcatctgtggattgcattttagagattctggagattctgtttctctgcaaatgttaaaatgccatatcaggagacttttggctggttagacagcattccccgggtcaactgattacttttttttttttttttttttttttttttttttttttttttttttttttgagacagagtctcgctctgttgccaggctggagtccagtggtgccatctcggcacactgcaacctccacctcccaggttcaagtgattctcctgcctcagcctcccaagtagctgggactacaggcacgtgccaccacgcccagctaatttttgtatttttaatagagaaggtttcaccatgttggccaggatggtctcaatctcttgaccttgtgatccgcccacctcagcctcccaaagtgctgggattacaggcatgagccatcacacctggccgattccattttattaatagattttccatcctgaaagtaactcctaaaaaccctccttcacttaggtttcctttggctttttgtgtattaatcagactgtgggccctttggttccatagacattccttttacaccccttttggacggatgaatactcactagtaactaagtaattagtaagagttactacaatttggtatttataaagaggtggcctttcccagaattgaaggtagaccctaatagtccaatcagccttccatagagatagctggctgccatgaaaagctgagagatatcaccgacctcttactgggcctgctcatgaacagttagttaaaattcctgcaattttcagaaaagacccttatcagagtattatcagtattgtcttaagtttaatattggtttccagttgttatttttaaaaattttaagctaccgtgggttaagctttatgatgatctgtttaagtggtttgtttgattaacttctctattggagtaatggatgttttcttcaccagaattttgaagataggtttgtgttgtagttgaaacctgttttgtttatacacttactgctaaggaaaagcacatgtcattttgttttccatcttcatccttctaaagtagcacttcattgttatgaccaaatctttctttcttccttccttcctctcaccctgtcttttccttccttccttcctgccctccctcccgcctctcttcctttcctctcctctcctttcctttctttctttcttttctcttttctttcgttctctctctctccctccctccctctctctgtccccttctccttccctccttccttcctttcttccttccatttctatcacccctaaaattccatcatgctgtatcatctcactaagtcccaatctctggaaaccacagctctgttttctgttcctgtaattttgccttttcctgaactggattttaaaggattgtaggaggcagtagtggaagagctaactttatatcttgttcttttacataatgcgccctgatccacacttgggaaagtatattccatggtacctatagacagatatatgtgctttaccatgtatatgtgaaacttttctaatttaactttcctgttaaattagaactcggtagcataaattaatactgttgagtatacttagggatttgcatagatttaaaattgtgcatatgttccctagggccatggcgttaattggtttattagtcaggtggagtgcagagcctgaggtcaggacagttgtccttgaacatggaaatgaagagtggataatcaccatgtgttattgtttgggctgattttatctttaatgggtgattcagagtcctgattaatatttagagcagtgactgctggcctcctacctgctcattatcttcagaactttaaataaaatacttgatttctacccaagatggtagttatgggaagccttttacttcttcttgtctcacaaagacaactcttgacctctcaatccttaaacaaaaagttctgcttctgcgcatgtggggactcttaaactcattttcatgcctggagattcacatttagggatctaggaaaagcacatctaggcagagtcgatgaggagatgctttaagaaccgtgacaaggacaggaaggaaatcaattttgcgttaggtttgtatttttagagaaaacgaatcctggggaacttttcacactcattactattgacattaataccattgtcctgtccctttcacagttactaaaatcactcttgcccaccctcctgccttgcccacaacctattcccatgaaggggtgacttgggagaaataacggtttccaaccaacgttttattttggaaacatttcaagcacaaagagtagttgaaaggatagtctaaagaacactcatctgtgtcatacatctgttcaatccatggttgcttttcgctctacttacctcctccaccctctcagctctgtttatgtatgtgtctgtctgtgtacatacacacacaaacacattttcccctatgccatttaaaagtaaaggagcatcacaacataaacccctaaacacttcaccatacaccattttcttaaaggatgacattctctaacataactgcaatgctatcgttacacacaaatttaacagcaatccagcaataccctctgatatgcagtccacactgaactttccccagtgccccagaattgttccttatagccactgttttcttccagcatctagtcaaggtttttgtctgtcatgtctctgtaccttcatttagttttgaacagtctcccagcattttgttttcctttcatgacattgacttttttggtagggggacagagtctcgctctgtcacccaggctggagtgcagtggcgcaatctcggctcactgcaacctctgcttcccgagttcatgtgactctccacctcagcctcaggagtagctgggattacaggcatgcaccaccacacccggctgatttttgtatttttagtagagacagggtttcaccacgttggccaggctggtcttgaactcctgacctcaggtgatccacctgcctcggcctcccaaagtactggaattacaggtatcagccaccacgccgggctgacgttgacatttttgaagagttcagaccagttctcttgaagaatgtcccatactctgggcttttctgatggtttccttgtgattagattaatgttaacattttttggccaaaagacgataagatgatgctctgtacctaccactgtatcacaatctggaggaacaaaataacattttgttcctattggtatcactaagaatgttaaggtggtgtctacaagatactttccttgtaaaatatccttttccctttgtaatgagaaagtaattttttgatattttgacatattataatatccattccttaaccttttaccctatggttttagcatttatggatgatccttgtctaattcagttataatattggtggttgcataatggtggctttctaattctaccatactttctgcatgtattagaccattttcttatgtaaagaagagcttctacctctcccccgtctattcatgaatatcactgtggacatccaaggtggttctgagtgtacaaagaatgatatctctctttactgaactgccattggatactatttttgtcttggaattgtttaaaatggcagtgtatggaattgaaagtcctttctccagagagccacataaacagatgtctaataaatacatttccatattaaccaatccttttatgggaacaacacattgacataattaaaacacgtaacatgaaaactgtgctgaattgagaagctcatagagttttgtttcttttttttcctttttgccacttcaatatatatggacccgcacctgtcagtccaggtagctcatacatgccgtagcatctaatggtacgagggacatgtaatgctgaaaagaagggggaaaggagttgatcagatgagatataagtatgcatttatcagtgttgtggggtattcacttgcaccttccattggctctcgcagccatgttatcggcatataattcagttgaagatttatattcacctggaaattgtcctaagtgggccttgcttacttagctatcagactctagtactttcaaacaaattaaagattcaaaagattttggggatcgccttgctttttcccataggaaatcacttttgtcctgtctttttaagactattttaagcatatatttcagtattaaaatcgtagataatcttaagctgtttccttaacctctttgggccttttcttatctgtaacataaagttaaaacaggttatctcaaaagttacttatccctaagtgtctttgattctatgctaaatgttataaaggccgaaagggaaatggattattgtacttatttcaaagcttggccatgatcagcaaagtcttacctgatcttccgggtaacaactcttgtatcagagctataagatatagaaaacagtcttgtacatagagtgtggcatttcacatgagaccaagtgttctctgaatggaaacacacactaagagcaagatgtgaaaaaccattgtgtacaacctcatgtaaatgatcccttgcgtccgtacactatagtttcctcagtaactcaaaggtaaaacccaagtatcttgtgtctaagaggatcaaaatgtcaccttccttctgttttatttgttacatgcaggttttgtatagttttatagagtctttttatcactcatttgattttcataaaaattgggattgtttggaagaagagtcattaatattctttacagcttgttcttgttcctccttttatgttctctgctggtgcagacttctctcttatgtaaaatattccactgatgcccttggtagatttagaggttgttaaagaaattgtaataacagatcagggaacagtcagggactgcctgtcctatactgtctgaccctgactaaccgttctccttgtagttttaaatctttgtgtacagactgtaattcaaaaaacagtttttataaatttaaattcagcaaatctttccaaatgctaaggctttttataacgagggctagaaaagttgagttgtcagctattaatgccaatacctattaacaatggcaatgacattgaaatgattttttggatttatgaagggaacatgttactaatgaaaatagcaaatgaaaatggccactgtattagtccgttttcacgctgctgataaagacatacctgagatggggcaatttacaaaagagagagggtcattggacttaacagttccacgtggctggggaggcctcacaatcatggcagaaggcaaggaggagcaagtcacaacttacctggatggcagcaggcaaaaaaagagcttgtgcagagaaactcccgtttttaaaaccatcagatagtgtgagactcattcactatcacgagaacggcgcaggaaagaccaacccccataagtcaatcacctcccaccaggctcctcccacgacatgtgggaattgtgggagttataattcaagatgagatttgggtggggacacagccaaaccatatcagccacaaaggagagattaccctttttaaaaatctgtggtttgcccacaatgttttccataaatttacctttttctgtcaataaaaatgtttaggaattctatttatggatatgtatgtatttaatatttgcatatttagttcttattttttctctaaatggttatgacctgtactaagtaaaatcaaaacacacacacacacacacacacatacacattgtactagcagacctgctttaccttgcttgggataattatctgccatgattaaataaataaatttctgcaactgtttatcctggaatacactgcatagagttgtcagtttgagaagcaacttgatttcaaatctgagtctacaattttagcgtgtttccttgtgacttctagtttggggcttttaatttcccttttgctctctctaccctcagtttatgaacgagtgtggcatttcggcagttgaataggcctatggtagcctcccagtttctgtgttgtagaggatagttgccggcttattaaatgcccttgcaggactctcagggaagtctgttgtttagtgaatagtgatgaatcaatgtggatttcttagttttgacaagtgaaccatatggttatgtaagatgttaacattggggcagggtttctcaaccttggtgctactgatgctttggcccgaatcattctagttctttgttgtgggaagctgccctgtgtgctgctggatgttttgcagaatcctggcctctatctactaaatgctagtagcaccccctccccgccctccccctcccccccccccccccccccccgcccagttgtgacaaccaaaaatgtctcccgtaaaagataccaggatgaaatcactttttgtcagtcccaaactaactagagccagggcagcatgaaaggaggagggttcatggttacatgcctgagataaagactgtctcaaggactttctaaaatcgccccacaagaaattcctctgttaggactgcagcagtgcacgtaatatgctctcaaaagaacatctgcccagtaatggcatccccactaataaactgacaccagttctggcgttgagcatctgaaacgaactatgtttccaagcagcttatgtaaacttctgtttttaccaataaaagtttccctctacagtctcctcttcagatgcatcttgggttgtaatcctcatttctaattccaaaataaatttaacatatttggcgatgtttttctctgatgttttttggtcgacactccaaacattgttatatttcctctggggtacggcatcatttccggttgagaaccaccgacctagagaaaagctatctgcctgtgcagttcctttcaagggccccaagtgtgaattttgtgtatacctatattttaagccagatcattctgtacataccttctaagtccagatgaagtctgttagccttttatgtgtgataccatcacatagaaaccaacacaaggacatttactgtaatcgataaaggaaattttggacagtttgagaaagtaacttattttgtcttctgctctttataaaatctttacaagtgtatgtttttgctcttcaggatgactaggcagctttttaaaattctgacttcatacagattttataatcttccttttatttcttgcgatcatattgcagttgaattcccacccactgttcaattcagcagattttaacagagactccagaagtatagttcctgtctttaattaatctgcaatttaggaaagaaattaaggaggtatcgttctgtattgtttccaggatggtggtttcttgttatctgagaattactgggcacagtctcttgcccaatgtttacttctctatatagagttgacccttgaaaaacatagatttgaactgtgtgggtccacttataagtggatcgttttcaaccaaatgcgtatcgaaaatgcagtactcaagagatgtgaaacctgcggatatgcgttcagctgggcctactgtgggacttgcgtatgcgtggattttgctgtatctcaacagcaaaatccccgtgggagtggggctgcggcgggccaggaagcaacccctagcatatactgagggatgactgtactaattattgtagtttattaagtgttcacatggttttcacaaacctcacaattgaaatgccaattgccttctcctaaaaaatacaatgtacgtgttcatggtagctgggatgcagggcttgctgagaaatacttaattgcatttcttctgtagccatgaattgattttattaccttgagagaaaaatgagtattcaggtggacctcctggcaggcggttggcccttcagtgtccaaggatttatagaaagcacaacatcaaagaaatccaaaagttcttcggaaccccagcaactctcctacctccaaacttgccatgtaatgcccttttaaacttattatattgataggtaaatcggtttgctagaaattccagatattgagaattctttgtctgtgtaccttgttatatttgtataaaggtgatatttgtatgaagccaccctccagtgtgctgtaacagagcaatagtaatgacaactgattccttcccctagcttttctgttatggatagttgctggcaggtgaggaccaacagaaaaagaggagaaacccaacataattccaaactgtgaccatcataatggaaggagctgtgatagctttgctttctgtgtgtgcatgacatagaaggggaaaatggagttattgccaaaacaacagcaaaagcaaaacaaagccaacaaacaaaacaaaacccagggctaaatgacctttccaagagattttgcttgcatggcttgaaactggtgtttagagatgaggacaaggtcacccttgatactgagaggggattatatctgagacttatatgtatctcaacaaataatggtacttacaaagattatctcagtccagtgaatgccatcatacttatcttttgaccttaataacttcctgctattccaatctatccctatatatttttttctggaatgatcgaaatgtaattttagctgggtttaattctagttctgttaggtctttacagaagcttgcctggcttttaattctttccttcttcattgccagacaaaaggagagggaatataccactaggatacagagtagtttgtcataaaaatgaaagattgaaacagaatgagaacgtgaatccccgtaccttgtcttcagtctgtcagttggcgtaggtgagcagttttaaaagagccaacatgatggatcttgcatcttaggggctagaaatttgagaatgttcaacctttaagcatagaagaatctatagttttttgaaagagtagaacattctacagcctcccttggtaattcacactaatgctttaacaactttcagcatcaggaaattcttccatatgagctacagcctaaattcttcatgctgcttaagtctgtttcttcttgttctgtcctcagtggagagatcgaacagctggtcacaggcccctatgcgagagccattcacataattgaaaactgttattaaatcgccccttcagaagtcactcttgcttgttctctctctctctctctctctctctctctctctctctctctctctctctctctctctctctctctctctctgagaatctgggaagattccagagctgattaacatgttgctttactgatgaccttctcagcttttaatatgttaacgtgctctaagaattttaagaggcagatataatgtgcactgtttctttcattaatttgaccttctcgtgaagcattttgctggacgattgatctgctggacatactgggaaacactgactcagagattttagttgagtaggaaccgtgtgtgagcctacggtacagaacaaaagaaagtaatccagttacactgtctggagaaatagaggtacattctccgcaatcatatttgaagaatagttttctaaatgacaatggcaaactaagccgtgtcatatgaagaagaagtaaaaagaataggaatgaagaggcatggacagataagacagctctggtaaaatatttaaagggctgttcaaagaccaagaacttctgggttgctggtcagatggataataataatgacaataacaatagcaaacatgattcttgctatgtgtcagacacggttccaattgcctttcatttgctgactcacgtaatcataaaataactctatgaggtaggcactattaatatttccagtttgtagcagagaaaaagtaagacacagagagataaagttattttcctaaggtcacacagccagtgagtggtgaactccagtggtttaactctggaacttctatatgctgtgctgatggatttcagctcaatgtgatgcagcacttttgacaggggtatctggacacaggtgttcaggatcaccttctaaggatgtttcccagctctctcacatgggtggtgtagtggctgtaagcacacactggcatgggtaagagtttggactcgatgaatgctgagtttggactcagtgaatcctgaaagtcttacagctctgtggtgccatgccaaaaggatgaatggacttgcatgatctttttcatttttagattgcataattctttataaacttttttttccacaaagtacctctgtgatggaactctacacagagaaaagtgctcagcaacagctttttaaaatttaacttgtaagttcaggggtacctgtctaggtttcttatgaggtaaacttgtgtcatgggggtttgttgtacagattattttgtcacccaagtattaagcctaatacccattagttattttcctgatcttctccctcctcccaccctccatcctctgataagccacagtgtgtgtttttcccctctatctgcccatgtgttctcatcatttaactcccacttataagtgaaaacatgcaatacttggttttctgttcctgcattagtttgctaaggataatggcctccagctccatccatgttcctgcaaagaacatgatctcattcttttttctggctccggagtattccagggtgtatatgtaccacgttttctttattcagtcttccattggtgggcatttagattgattctaggtctttggtaaacagtagcatttgatcggaagtttgaactgataccattttgcagctaggaaatccaaagttaaacagtttattatagtgttgctaaatttagaattaggggtaatgactggagtgctgttgaggtgatcagtgttataagccaaatgacctgtcagtctaaaccctcctgcctttctatctgaaatgtggatatgtcctttattaggaaaccacattacaagagaagcaacttggctttgcagctcaaatacccatgacttgtgtgatactaagtattcccatgtcatatattcaactgaaattggctgtggaataagtaatgcttcttggttcttggcaaaagcaaaggagaatcatctctggagaaagcacttttattctaggctcaagcttttatttatctctagaaaatattggtaaggtcagtttagtacgtggtaaaaaaaaaaaacaaaaaacatattaagcacacaagaaatcaaggtggaaaaagaaagaaatcaaggtgaatgagaaccagaagaaatagcaaaccatagaagcagacctacgataacatcatattccagaattattagacagattattttcttaattgtgtttatgcagttagaaaaataaaaaacaacattgaaaaatatctacagggaaccacaaacctgagaagttaccttaaaaatgaccaagtagtatttctagatgtcaaaagtacaataatcaaaatttaaaactgtatgggtttacagcagaccggcaagagaaatggatacccagacagtaaggcagaaggaattaataagaatgaagcacagaaggatgttttaaaaagatgtggggcagagaggggggaactagggaagtcctgttcagagaaatatagattgaagaagagtaacatttatgtaacagagttctgaaagtagaatggagagggaatggagaagaggcactatttgttgagagaatgacggagaagattccacagctgattaaagactctaaatcacaggtttaagaagtccagtgaatcctaagcagtctaaatcaaatcctagaaacagcacaagatagaaaacagatagattatctttattttttttattttatttttattatactttaagttttagggtacatgtgcacaatgtgcaggttagttacatatgtatacatgtgccatgctggtgtgctgcacccactaactcgtcatctagcattaggtatatctcctaatgctatccctcccccctccccccaccccacaacagtccccagagtgtgatgttccccttcctatgtccatgtgttctcattgttccattcccacctatgagtgagaacatgcggtgtttggttttttgtccttgcgatagtttactgagaatgatgatttccaatttcatccatgtccctacaaaggacatgaactcatccttttttatggctgcatagtattccatggtgtatatgtgccacattttcttaatccagtctatcattgttgggcatttgggttggttccaagtctttgctattgtgaatagtgccgcaataaacatacgtgtgcatgtgtctttatagcagcatgatttatagtcctttgggtatatacccagtaatgggatggctgggtcaaatggtatttctagttctagatccctgaggaatcgccacactgacttccacaatggttgaactagtttacagtcccaccaacagtgtaaaagtgttcctatttctccacatcctctccagcacctgttgtttcctgactttttaatgattgccattctaactggtgtgagatggtatctcattgtggttttgatttgcatttctctgatggccagtgatggtgagcattttttcatgtgttttttgcaaaggagcaacagtcatctttactattgacttctcagcagcaacagagatagacgaaagtggagtaatatttcagtattcaaaaacaaaataaaaacaagaccccaaaacctttcaatcaaaaattttatacttgggccaggcgcagtggctcacgcctgttatcccagcactttgggaggccgaggcgggtggatcattttaagtcaggagttcgagacctgcctagtcaacatggtgaaaccccatctctactaaaaatacaaaaagtagccgggtggggtggcgtgtgcccatggtcccagctacttgggaggctgaggcatgagaatcacttgaacccaggaggcggagattgcaggagccgagatcacgccactgcactccagcctgggcaatagagatagagtcagtctcaaaaaaaaaaaaaattgtatttaatgaagataactatcaggaatatggattttttttttaaaaaaaggaggtattttcagacaaacagagcttgagaaatgcaccaccaacagctaaaggaaattctaagggacatatttcaggcagaactaatcccagatggaagatttgagatgaaagaaagcaatgaagagcaaaaaagtagtcaatatataggtcaatctatctaataatataaaaaattaaaacaatcctatagggttgaaaaaaacaaggtataattaaaattcatgaatatagtaacatataaatcaaatggtggtattttgagattgttgagatcattgtcctgtctgggatgaattgtatttcttacatttagactttgaaagagagagaaatagagaggcagacagaatcaacagggcatcatgaaaacagcgctaagccaggaggtttggattctattatcagctctgctgctagctgtatggcctttgaaaagctccttttctggtctacaaaatcagtttgcttgtctgttagatgaggctttggaaccagatgaattttaaagcccctcattatgattctatgagaaacagattctctagaaaaaaaaatcagttgtccccctcctttgaaattttatcagtaaacacctgcatttcacttctggctaacttttatgtatcagttcaaaaattaaagctaaataaagtctcgctcaggtgtgtagtttgcttacctttctcgtttgttggttttgttttcttttcttgtcatctagtagccaaaaagagtaatggcagtttaccaaagccttaggagtgggtagctctttggatatcagggagcatttgcagaaacaagctgtgaaaagccagcctagctttgcaaccattgttctttctatcttttctgtttaacttattaatcgaactgatatacacctcctttgccatcttgccttctttcctttcatccttttgccctccttctctctccctcctgtctttgcaggctaataataagccagagatcgaagcggccctcttcctagactggatgagactggaaccccagtccatggtgtggctgcccgtcctgcacagagtggctgctgcagaaactgccaagcatcaggccaaatgtaacatctgcaaagagtgtccaatcattggattcaggtattaggaaccaaaaaaaaaatgtcatttttttctcatcatttttcacctttttatgacttgatcttttatctcctgtgccagttgctgttagttcgtaccgtctccaaagtgggagagaaggtgattgggctggaacatcgatcattcctgtcaccctcctgatcgctaggttattttggtggatctcacttattaggctggtgtcccttaccaccttcactcttcagctcttcggagccacatttttggttgagcaggccaaagtgcgtgtcttcacggaggtattacagatgaactgtacctcctccttcctggaaccaaaacatttttaccatctttcctttttcacggtctttcctgtttatagaaacttcccaagaatcagttataaaactgagagatgattctattctgggaggaaccataatagtagctcagtctctcattcactttgcaccatttttttttctcccttaagtaacaagaattgttttcagcatcttagaacttgcttctttatctgtgaatctgattacattctttgtatagtatcccagtgaacttctaaaggaataaaaagtaggcaagtaaatggaagattcacaaagcagctaaaaaacaaccagtccttatacatttagaagtgaaagagataggaaacgtagcaggttattctgatagtcttaaaatatcatggaaaacaaggccaaataaatctttagccctgctgacctgtttggggagacaggatttttttttaaatgaattaatctcacttaacattaatcctaaatcctaattctgaaactgcgatgtccttaaatgtgtgaatcaacatcaaggtttctatagtgatgaataagccacaaagttgtaaactagctctatggtctatgcctgtgcagaatccacttagcagcaaagtaaacactcttttccagttacgtgtgaactggttttgttactttattttctaataactaccttgtactgttgcgtgctttttattcatagtgcttttttacttttggtgtttattgttccatagtcatgctgtttacaaagaggttttacaaaaacttttagaggtttctgaagcctagatagacaacagtgagtaggtactgcttgcaaaggtcaccttctttccttcccggtttcttggcaggtaaaaatgataccatgggggtggggagtggggaagggaagccacagtgactgcattagatttctaagctaccttttctctgcttccttagctagtgggctttgtatacaagggaaatttttataaaataaagaagaagaatgccttggaggatctgaaagagcactttcaccttcaattcttttgcccttatcatattatattattttaggacccagcacttctcattcctcctgtccccctcttgaaagatggctggaatctaaaaaagatagctttccttcccacttccccatatgtgacataagaaatatgtttatttgaattggctaaggttcttatctgagaaagcaaaaggcaggagagtatgaaacaaagaatatcgcattctgataatggaggaaatgtaccaactagtatttacagattataaattcttccatctaatccaaatttcatgttctcttggggcttcagttatcatttgtaggtaatggggtgagagatttctgaagagatagagataaaagagttcattcgagtaactgtttgaagatgaatcgtatcagtcaattagaaaacattattaaagcgagacttgttttaattgaaagttcttgttcacatttcttttgtcttgtgaaattgctttatcttgacaatgttttgaaaataattgcttcagaaaacttttgtcccatgatgggtaaggggcatgcacagcgtaagtctgtcgctcctggaagttcttttaaatttgagtatttggttttcaaaagactggaaattttccagtaccttcctacttaatctcaaagagttcctagtggagtttaaataaaagctgagtttttcttccctccttccatatgtttataggataatctttctgccaaaatgttttggtactgtaggagaggcaccggaaaaatctggaggcagaaagttaatcacttaccttgtgggactaatgaacattgctttctgtttctcaaattagaacgtggtagaaggtttattaaagagtgttctttgggaatttgattcgaagaaatacatacgtgtttgtttttgctctttatcaggtacaggagtctaaagcactttaattatgacatctgccaaagctgctttttttctggtcgagttgcaaaaggccataaaatgcactatcccatggtggaatattgcactccggtaagtttgacgccagcctgacgtgagagttagttcacctgggataaatttcagttttgtacaatactgcagatcatgtataatgctgtgatttgtcacttccccagatgttccccagctaaagtggctctcaactgtaggcttcaggatttaccctatccctggtgcctaggggagtgcctggcacatatggaacatgatagaccctcaataaatattgttggatgaataaatagggttttcattctgtgtgcatggttgtattgaagacgttttcacgtttattttgcacagccttagaggttgtgtggggcgatcttatggccatgaggcatgttgagtatgggggatggttctaggttcccccaaattcataaactaccacttttaatcaatgttgctcacctattatctgtcctgtatactagtgacattttaaaaatccattttatatgctaacacttactaaatgctaggcatttaccttttaaactaccctgtgtaaaataagtactatgatttttatcccctctatacagatgaggaccctgaggtcctgaggttaaataatttactcaaggttctataagtaagagttgaagccatctcctaagatgttattttaggaaaatgttaagtggccaatagaactgtgaaaaatcactagggaaatggcaaggatgtagacttggtggccagacagacctgagtacaaatctgcctaagaattaaagacaggctcctctcaggtttgttttttctaaaataaacctgtccctgttgactgtagagccacccttcgtgtttctcttctctttctttaattcttacagtctcctcttctctaaactttgcatgcttgctattcaagatacggtctgttgactaatcatcatatgtctattggcattaccttggtctttattagaaatgtgaaaccacaggccccaactcctgatgctctaaatcaaaacccacattttagcgagatctgcagctggttcccatacacaacaaagtatgagaagctctgctttagagcatctctctcttccatcatcagagtgatcctcccagatatttgcctgtctcacttttattcctcttatagagatggtcagtgattgagaatgtaccatgctatgaatagaccgaaatttagtgggtgaagcatgctatcattttgtactaagtagtttttaaaataccataaagtgtggtaaaatttaatgtcacctttttgaccttaagacctataaactaccatttattgagtagcctagtaagcttgtatgtttcttttatttatcataacaacgtgttgaggtgttgttgctcccattttactgatgatcagagcctctgagaagtaaataactcagccaaattagtacatgccaggcctggtttcagagccccatttgtctgattccaaagcctttgctcacaaccacaacactctccttaattacaaaacaagtgtcatggggcagaagactggagtggtcattagttttgaaatcatcctgtcctaaatctgatctcaccatgatctcccttttagactacatcaggagaagatgttcgagactttgccaaggtactaaaaaacaaatttcgaaccaaaaggtattttgcgaagcatccccgaatgggctacctgccagtgcagactgtcttagagggggacaacatggaaacgtgagtagtagcaaaagcagaacacactcttgtttgatgtatatttgaactcctctcagctgaacaccctccttcactcccaaatgcaaacagtctcttctatttctttctttttatttacattagctgaaaagagaaaaataagctgatgtccagttgccactttcccacgtcacttgacaatttctttttccaaaagttaaactttatctcacagggggaaaaaaaaaaaaaaaccacaacacaatacagccactaattgccttacaagccttataagaaatatgggactgtttacaaatgagtgattccagtatttcattttgattttcctctctcacaaatcagtaaatgtgtgtctttttgtatctcattgtgtggtcatatctagtcacttgtttctactcaaaagaaaatatagtcacaggaaactacttcacagtaagtagtaatgattctcaagatcaaaggggacgtcttcacctcttttcaacctgctcctcttttttgccttaactctgatggcagtcacacaactgtgtgtttttcttttaattcactttacaccttggtttggctattgctttccatggttcatacttaattggctggattttatttattttgacctttcagtaaatttttttgcggctgagtttgcgtgtgtctccttcaccacctcattttttgttttgcagtcccgttactctgatcaacttctggccagtagattctgcgtgagtactttttttgctgaagggtgctgctaccaccaacacattcgctcgcttggttctcttttgttctgtttatttgtttgttttcttttgttttgttttgttttatggacatattaattccccttccttcatttcagtttttttttttcttttcttgatgagactttgaaagtaccatctacacagatcaggagaatcagagtgggttttttggttcctccaccaggtgaaattcaaaccagcagaaatcctggcttgaattcaaattataatcaaagaagttattggagttttagctgtattcctgggagacatgtttatatatttcttcatataaaagcaaggaagaagcttctgattacataataacattctttagccatatttcttgagattcgatgctttttagaatctttagggtctgttataagtggactattaaaaatcagcagaattcgttttaaagtatgatgctgagtttggttgaataattttaatgaggtgtgcggactgtttatcaggttatgccatgctatttgactaatcattatatacaagggtttctaaattttgaactaaactcactttgctctcctctccaagctaaatattcagctcataaacaattatacatttgctctaggaggaaagtatttctttgttattactattggtgtgtattaataatactgagcttagataccagcagatgatttatctcagagtttataatgctagaaaactcttttttggggcctgtgatttctatattagcaaacaaagtgcctattttaaaactacattatgtagggttgttataacaaacttttggtatttcaaagtatgctttattaaaatatttattgaaaatcagacagctctgttatggataaaggggaaatgaccaattcggaagataagcttgtgtaagaattcaatttctttttattaaatcttttttattgttccaccatataatttaatctaaactagatccttttttaaaaaccctgtcgtgataaatgcatattattaattgaggtttattttcagtctttaataggcctaaaggaagtggaaggctatgctttcctttttaaaacttcgttattgcgccccttaattttgagatatggtagctataagtagtatattatctgatttatttaatcatcatgcttaaagaacttagggagttatttaggttcagttatgtcctctgcctcttggaaattgtgtttcctaacccaggtagtctgttatagaagttacaaccgttcataaataagaaacttttaaagagttgatacactacagtttcagcttgattggatcctgataagggaatggatttactctatgtggaaataagtttaaccgagtaagaaatccaaacgacaaatatgctaaagaacagttgttacaaatacatagataaaagtagcaccaaataataaacaaagagtaattaatagtccttgaaaggcaaaaaggagctacacgtaagctaatgagaaaaacattatgacaatcagattaacttattttaagtagaagattttgtctgtcttaaacgttgaaagactttaaaattaataacatcttttatttaaaaatattttctaacaactaaaacacacctcccaatttgcctttttatgaagagttggttagattattcagaaatagtgggaagttttaattttgaggaagaaaacaaatctagcagactgaagtctgtgttttctttaatagcagtaattgtatttaaagtatttattcataggattataaatactgtataaaatatattacaaagccatcctattcaggcataagagccaggtcctaacgtgtttcattttgcaagacttgtatctaatgttaacaaatcctatgatgattacaatatttgatccatttgatatggatcacagaatttgaaagtttccagagatacagaccgtttggttttccttagactaaactcttatttgcttgtgtttgtcatattactttaaaactaaagctaacataggcctttacgttgtctgtccataagtgagccagtcaaacgatattctttgagcgattctgcattgaaacctaaatgaatgtcagcttttaattaatagagttttcataaaagagaaggtggtggtgggtgggatggaattgaccaagtaggtcattaactcttatagtaagtaatccttctgggtatatggttttgtgtttaggaagtgggaagcggggaacagtattattaccttcttttggaagtgttttagaaggctttgcacttagttttgtttgtggactaagtggctttgtattttcactaattcttggtttttaaatgattcatctctgaccagtactcccttttggctcattttctggtttaataaatgtctcttttagtgtatattttttaagatttctggttattgtaagttcttgtgcttatgcatgctgtgataggcgccactgatattaataagaaaaataacatggaattatccttgaggcaaagaattaaagctctgtataagattttctgtataaaatggtattaaagtattttggatttatatgcctacttttcttggtgtacttatgctccaaggtcttaggctttcattcttgtacacacttccaggatagcaactattacaagggaaaacactactaatgtattttccctgatggtaggctttttgcttattaaaaaaatatgtaattgaaagactggtctgttccaaaagatagttcttataatacaaataatccaagtattaatttatcttgatctgcagtgaagatttcaaaacagaccttagcatttttctaataatgggctatgccagggttctagaagattaacagattaactctccaaaactatagtgaagtttcacatggaaatctttggatctgcttattaaattgagtagtcatcgttttgtttcctcttgacaatttaaacgtctttataactcatttcaatttgattatgattacacttgacctagatgacattggtttcataaataagacctttctctctcagggaagaattccatttccctagttatttgctatagtgtgtcgtaattatcttactgtagtatattaagaaatatgaatttctggcacattttctaatgcaagcttagctactggtaactgcatctttttcttttttaatgtaagaagaaacaaacacattctccttagtgtttcaaccaagtccttcaacgctacttggacactgggctaaaccagggtcctctctgaattacattatcgttgacttttggatttatgcctttacctaagggctttctgtgtcagcagagaaatggaagagaccttttgtgctattccaattaaaagaaaaagtccaagcctaaactggttttcagaacagatggttttttttcctaaggttaatccaaaagatactataaaaacttcaaggataattaatagatcagatatgaaaggatgaaaaaatgttaaccctaccagaattctagcctatggagataagaaaagataggtgtttatatacaaaaagcatatagactattcctgctaatgatctcctcttattttctcacctatgttttagcacacagtatctctaagaaatatttcagatatcatgacgttctatgaaatttagtcattcttttttaaaacctcacaatataatccagggtcattctattttgtgctagaaattagtggtatagtcttgctgctgaattggaagatacatttcttctttacaaaattgcatagatcaagacatcttgatacatggagttttaagaagtcttgtactagagtagcctctttgaagctaaaataattgtaagtatctaggcagatatacagctttgatccaataagaagatagcctataaatggcgcaggtgtaaactatttaaaattttaaaccacatagggctaacacaatttcggaattataggatgtgagaaattacaaagtaggaggacaaaatgcttcctagaaactgtctcccccaaccttttctacgatgggaattttccagagaagattttggcctctcttcatggcttttaataaaagcagaagtatgagaaatcatctctcaatcctggattttaaaatacttgataatatttaagatataggagcaactaaatgtatacattatccatagaattagaataaaagcattctaggccatgtgtataacataactgtgtggtgggttttttctccattaatggatggtatctgtgactaatcacattttctgccttataggcctgcctcgtcccctcagctttcacacgatgatactcattcacgcattgaacattatgctagcaggtatgagactagttgtatgccaggcaaatattgattgaaataactaaccaaggaaagctaacctatgatattttaaacaaatcttttctttttttccccaaacttgtctgattcctactaatcaacttgccctctaacgtgcatgccgttccactgcatgttgtttttggtcaccaacaagagcattagtccagaataatcttccctaaccctggcttttaaacatttccggtagccttgctatgtttttttatactgagcacatttactaaattggcttacaaatagtttaacctccttagaaaactgctagaccagacattcatatatgaaaaaatgatactatattatatggagaatatgaaagcatcagctttccgtttgtgtatttattttacatgatatgctgtaaagaagagaataattaattttcctaatccttggacttttctgtctcaccttctttgtgtttgagatgatttttatacctaaaaactgaattactaattttaaaatattttatgcttgttaaatccgtaagagtttggttaacttttttagttgtaaaaaaacaaacaaacaaacaaacaaaaaaccccctgtataattgcctgaggtgaagaagattttaaaggtaaaaattggtggcagaatgtttagagagcttactgtgcatccatcctttgtcaatattctaactgctggacatgtttaccaatcgtgaaaagcattagctagctgtgtaagtctgtcatcagtggaaagtagtaattgtcctaaaagacaaggggtagtgtaaggtagggagtgcacttattgttagggaagcttttcttctgaaaacaaagacctgttctcagtgaaagcaagactgatctgtagggggaaaacagtgaaatataactttccttagaatttctatcataaatgtagtgctactaactagctgtggtctaccacacactgcctcaaatggttaagccaacacacacatcctttaatttgaaggattcctttctcttcttgccatgatttatcctttagttttcaggaatgttcgattaggtcttgaatagattctaagacgtcacataagttttaatgagcttttacgttttttatcaggctagcagaaatggaaaacagcaatggatcttatctaaatgatagcatctctcctaatgagagcatgtaagtatcccatctctttttacaaaatgttcctgacaatgaaattgctttgagggatttagaggtaggatagcacaggatataggaattagcatcatattcatttgatcttttaaggagccattcatttacttttttcctttaattcttaatgccctggcatggaatgagctcatccaaattctggcattattagtattcagagtagcaaaaatagtttgccttactcttatttgaacttatttcataccatatgattacaaattgcagagtcccaagtatttatagtaatgcttaatctttgaccaaacctgccagatatttaaagggataggatattaattttaaagtcatggctaagtactattttctccactcatggggagtggaaacgtgatcttggtatagcatggctattcacatatggtaggttagttgggcattttccttcagaaatccaaagaagtagatttttgtgatttagcatcttcacaagataaataaagtgaggcaatcttatgaagagtttccagaggagaagtaccaattcaggttgcaggttgttagcaggatgataagccaaccctgttaaactttaaggacggagatagagcggtgctaagagcagcagggaacacagctatggcagggaaacaggcttcattatagagtgagggcagtgttcacaatacagagcacaaaggaacattgccatgaaccaagtaaatgctgaccggggcttgaggtagagagagcagacattgaagcaaatatgaaggaaaaaataaggatttgccaagtgaataaataacataaagagaagaaatctagtcaaagtattacgatgcctttttagtttgataaagtaaggatatctcacccatcttggagaatatagacaaagggaagaatggtaaatttatcatatgtagttggtgtggcaacacaaagtcatgctcagatgagaaaagaaccttcataaggattaggccaaaagaaatagtatcaaagtggcatatatataactagttattgaagacatgagaataaataatctcatctggtacataaacgatcaagctaataataaagaatcaagtcaaccctcagtcatttgtatatgacttacttccttcaaacaaacaaacaaaaaagcctttccccaaccataactgtgatgccttatctttcttagctatgggaaaaagtattaatggtactaatatataagatacttcaacagtaaaatgtgtggccaaagaatcagccaaatgtaaatagcttgtgcttctttggctcactgattttggtattagaagctctagcacattcagattaattcgagttgtatctacgtaacagtggctgtcattcattgactgcctaagagaacaggaagaaaagtgtagttacaactctaggttataattaaacatgggaagttctagcagtacaacttcagaatttggaatgagtgtgataaattaggtggtaaaactgcttttgttttattttaaaataagctttagcttattctgaggacataaaatccattttgactcaatgttggatggcaaaaactcatggcattttaggggcaggtttggggaagtggtttggtggattggttgacttcacttaaatgtgtgtttttaatacccaataattatttttagtcagcttttcacatctaaaccaggtaactggcttgataaacaaaaataattcaaatgagaaggactttttcctaaatttctgatatttttcaacttaagtgggtatggagaggagaatattagcgtatcatcttaatgatatctaaccagaaacaatgagctttagcctgtcattacggacagaagaaaattcttataacttggaggtaaacaggcctttccggagcttggagcaatgcattcagaaaaaagtttgtcctgtgtattagagagttcctagtttccaggaaagattgtagctgcctccccaaatagaagcctttttgcctccttttcccgcaagattagtccttaaaaccattatgtataaatttaaaaataaataaaacttgtatttaaaaaaactctgccccgaggaatgagatgttcagtcttcttttaatcagtcaccttaatgtcttttttccccttaattttcgttcttctgtctaaacaataactgaatgaaacaatcatgtatctccagtttaattgttgttgtcattctgcctcaatgacttatataagttaaaactgacttactgaagcaatactttttggttacattgccttccacttaataaaatatttcctctgttacttttagagctgcaaggtattttttcctactcagtacaacaatagcgtgggttagtgaacagattatcttgacaggcttggtggccaaagcattatacagccattattatatcttttaatattttttagctattgactaacatcaacgtagagtcccagtatttctgtaattctgcctttcatttatccgtgtaaataggccaatcaatttcatttgaaaatctgagcaagaaaacactttgaattggtaccagtagaatggtagatcacaacctcagcagtatcaaaaggtctttagaagcaggaaaaaaggtctaattaattgttaagagcaaataaatgtttctattttcaaatacactcctgagtccctaacccccaaagcaaaataagggggggaaaaaaccaaaacctttgattttattttccagagatgatgaacatttgttaatccagcattactgccaaagtttgaaccaggactcccccctgagccagcctcgtagtcctgcccagatcttgatttccttagagagtgaggaaagaggggagctagagagaatcctagcagatcttgaggaagaaaacaggtgagttttctttctagctttgtcattggtatgcagagtgcatacacttgcacacatagaaaagtgccaggaatcttcacttagagtcattttatgtctaattgttttctaaaataatctgtttagctccatttgcagattctctctctcttttttttttttgttatctgaaagaagacaatggatgcaatagtatgatgaagaactcatattttaggtgtgaaggagttaatgctgatggtggtatttgacttgttgcatgtgtctccaaggctttgattttatatttcagaatagaatttaagaaaaaagtaggttatttaattttatgattatatgattttttttacatgtgtttggccatattatctacctcaaacatttaagaaagtagggttattggcttggtcatattgggaaaccaattgtttcatcttatttttcatcatcaaatgcagaaattattatttatgctcaccatcatagcaggttagtgagacaattccaattgtcagccatcacctgtaaaagacagtcatgtaaaaatagcagaaattgtagaagagaaaaaggctaaagaactctcataatgactgcagggaggacaaagatgtaaacatctggggtactgtattgtgtcaggataatgcaaatcattggactttcagttctgtattacatttattatgtcacaggtcccttggtttaaaaagtcttctcacatgatcacttctaactcacaatgtgccttcttcagacagatgccaccaagcaaggatttaaagtagatgttgctcagatttgtgggtcttaagtactttcatctctttggttgagcccaaggcaccaaaagctcttaacgtaggcaacgcagtgtgtctgagatcagtgccctcgggagtatgccacttcaggatgaaaaaacaaactgccactcttccattgcttcctgctgccactgcgagccttctagctcttaacaccttttacctatggccatagctccttatctggttggcttccctttagtctctttcccacccttgcaataaatcctccatactgactctacttgtacatcttgccagaaccaagacccatcatggcattcccctttcactggatttctgcatgtagaaaaaaatcaagcttcttagtggggcgttcaaacccttccacaatattctcttgacttgctttttctatgccatcttcttttgttctccctgtgttctggctatgctgttgtagctagtatttctgaatacatcctgctctcatctacctttggggtcaagctcaagcttgagtctcagcctaactgctaacctctaacccaccactgccgtatctgacaaaggaatcccacctatcctccatcacactgctcaaaataactttccccatggagccctgctagatccctgcagttggaagaaatctgtcttttgcctctattcccagagcactttggacctttctcagaaaattccttgacagttttcctttttatcagttattaccagtgcctctctttaatgagctagtgtgtgtctttggggcatggactgtatcttaatcatcttcatatcctccagagtacttagcatggtttgaatatttaatggctactcaggaaatgtttgctaaaaacctgaaaatacagcaagaacatcacatgagtaccatccacgagataatattgaactttttttgttgttttaatgatagctttatttttggccgtacttttgagatcatttgtcagtgaagaccatggtagagaaaacatttctactttattgagaataatcagtaatatccatttatgttaaatctgtaattattgtaggggtcaaagtcaaatcggaataaaaagttggaactgacactgtaaatagaatttgatgttaccaaggagtaaatatatttttgaagtatatgatcgtgtaatatatcttttgagctcattggtcaagagccctgcctcgtttgtggttagcatagtctttctccgtaccattgcacccgggtcaaagaatgtttgtaaagagtactgataactatcatttatttatcattttatcattttgagtgcacttttacatattttagatcatttaatcttcttacaaacgctatggagaagagactgtcgcctttctgtgaatgagacacaggttcttagaggttcacacagcttgccccagatttcccagtcagccagtggtagaactgaattgaaatccagatttttctgactctaaataggcaactctgccttcaaccagataataaagaagagtaagtctctgtgaatgtcatttacatagaattgcggcatattccccagaatgtgccttaacttgagggactatctatgaggactgagtgtcccggaataaacctgttcatctacttgtggcacagcgataaccgctttaccctggaagatatccaagaccattctccaagaatgggatggtttgttctctaaaagaacaaaaaacataacaccaggcctacttagagctccaaaatgaggactctggggttgatgcaaatctttgtgtaagttaccttgaccttcacgaaatgatcaggatgagcttccttcattgtcccttcattttgtcctatttgaccttctaccaaattccaaagaaatgtctccacagagttcccttcctgaaaacagcccgtgtgttttctttgatctgccctgtcctgtcttcttgcagttctgcgcaaggagcttcagagccctagatttgccttcgctacccttgaattcagtgttgcttaaggagcctttaatttgccatttcctgttgagaaaacccaggaattctttagatgccctctctgtgcatgtctagctggctatgtcctaagtcagcattgggctacgcaatctgacaaatacgagcatacttttagagaaaataagaaagtatatttaaaattgagattgccccaagtcctttggatgtgtacttattgatctgttaatatatatattttatgttcctttagctgtgatttatctccaaataacagcaaaagagagaggcctggagagccccattcctgactagatatttattaaattccattaattgttcttattcatgacacctccctacaaccccctagaaaaacagaggatggctgtttgagaagtgtctcagaggtatcttatctctgcctttagaattccatttctcctggttgttgcacatagtattcaataaatatttgttgaatgcattaatgaataaatgaattgaagctgaatttattttaattgtagcatacatgcatgcacttttgactaaagttcttttacaaacctaatttcgtagagaaaagcctttcaaagactttgttttctgcttgcttttcaaaattctcccctttttcaaactgccttgattagcaccaggcatggctttgtcataaatttagaatgttaagaacccgttttccaaatcacaggcactgtatgtatcccacattggtgttctctgattcttggttgatgccacagagataaggctaaagctctgagtaaaagctaaatctgactgagtttttcccatagtgcctcccataagtttggatgactaatggtgttagtgagatatctaatctttaatatttcgcttctgcatcatatttctccctcattaccacatataattcagatacatctttatttggcaaagagccactggatcttgggtttttgccccattgtgtgtccttagcattgcagactcaaggtttacttttttttcttgcgttgattaaagccttcagtctcctgacttaagcctgtagtgttcaaatacagagatgtatttgtctctgcactgtctaaataaaccaagacttgctctgaaattcaaggtatgatcctagcaatgaaaaggtagcctttctgagagacaaagacattgtcgttctactacctgcagagcaaattgattagattgttctcaagtcaacaaggtggctaaatattaacctaattcaccataaagtctaaagttaaagttgttagtagatgttatataacacgagggaactctgtagattcttaatacctactcaggacctttcatatgtcttgttgggcagtaagaccttatgaagccaaaatttgagttttctctttttcctttaaattcctccagtgattgtgcaagattattattgttacagtcaaagaagttctagatcagttactgataccactgaattaaagtagctggaaatcatgatcccgttgctttactttgtaattgacttgatgactttggacctagtctagtagctatcaatcttcatagctacgggaaatctttattcaatgttctttcattaggtctttgtgcaagtctccaatgatggtgaaaagatggccaaaatgaagggaatctgaagaggttaggaatgggcattcctatggaatataaacaaaggtgtcagggtgaggaatggcagagtttgtttgagggaaactgcagttgtattaccttttttaagaaggcaaagaatgagaggagatgaggctgaccaggtcagcaagggcaggtcgggaagggtgtggtacccactgcagagttgctgcctccgtgcctagtctagggagcaactcaagggtgtgatccaggagtcaggccatgatattgacatgaatatacgccacacaggcagctgtgcggagggtaactttgaaaagagcgatgctggaacgaggaaatcaagctggggggagtcacatgggagcccaggaaagagatgattagagccttaagtaaggtgatagaaatgaagtagacaggctgatctgagtgatatttcgggggaggatagagctgtttgattcggtagttctgtgggactagggtatgaaggaatgattcccagggctggtaactacaaaacaagatgatagtagttatttgcagctgggactgataattcaggaggagttgcagcaggtccatcctttaatgcagcagtgtttattagaggtccttcctgaagggctgagtagctggaaggtgataaatgaggtatggaagaggtcgagttgaggtcctggtgacatctccatgtgtaaatgtctgacagtctgagagatagaactctgatgcttgtagaaaggatataagcctgagatattaggactgtgagtcgccagctcacaggtggtagttgaaaccgtgagaatgaatttatatatcccgggagcatgtagcagaaggagaacactggatttggtagaactccggaagatgtgaacattaaagtgtgtatttaattacttttatttttagtagagaatacatgtatattattatacaaaatccaaagggttcaaaaagacatatagagaaaagtgaatccttctccaaccttctcccctggctgtggtgtttccagctctggaggctgccatctttcttggtttcttgtgtttccttccaaacatgctctctacatatgcaaatatttgcaaacatatttatggttgttggggttacttcacacagtgtcgtgcagtgttcactctggttttctctttttacttaaaaatctctaattttcacatgctggagaaatgtgccagaagaagaggagggcagagcttgggaatgatgggagcattttcccacaggaggcaggagagagaagggttagggaactaaagtatgggaggaggcgtgaccttgaatgagaggaaggactgcctctgaagacaaagtggtaggtaaggaatttagggtaaggaagggaggaaagaagcataatggaatgaatgttaaaatgtccagtagacatcactggaaataattcaagactgattcctacggctgttcccacatgtttttaaagttggagtggagaggaaagcgtggtatatgatacatttaacgaaactaggcattcaagttacttggtgtattagtccattttcatacggggcaatttacaaagaaaaagaggtttaatggactcacagttccgtgtggctgggaaggcctcacaatcatggcagaaggtgaaggaggaggaaaggcatgtcttacacggtggcaggcaagagagcatgtgcaggagaactgccctttttaaaaccatcagatctcatgagagttactatcacaaaaacagcatgggaaaaccccacccccatgattcagttacctcccactgggttcctcccatgatatgtgcggattatgagagctataattcaagatcagatttgggtggagatccagccaaactatatcatttggtgacatgggccccaaaacaaagggctacagagcccttcttgagacaaagggagctagtttgatcacagaaatcagaaagccaagaccttttatggcaaggatgaataagagctgaagggcatacatgccacatttaagaagctgtgtaagaatggggtcaaccatctcagctctactcaggcagggaggacaggaacatggtagaagtggaatcaccattattcacagactcagtttctaactagcagggccagtgtaactaaatttccttcagtttatccaaagttaattgaagtctgaggggactgattcatagtatgcagttcatggcagtgaatggataacccagaatgaaagtttatttctccctttatcctaattatctctctttttaactgccttgtattaaaatgttatcaaggttgccttaaagcttttttaggaggagacagcatctggtttaagtgcaaatactagatctattaaaatgaggaatatattcattttttcggcacacagcatcctgtgtcttagaatccagtgtcttaggaatcacaataaaaatcaaattgtgttctggtgagcctagaatcttggcatctaaaattggatgtttgtgaggactgcttcatactacaaaaaaattgaagcacccctctggcgattagaatattcacatcttacaagtacagctgccatctccctagaacatgctggataagagtttatgttcttacaatccaatttcccttttttttttttttttttttttagatttttcatgaagaccctcatcctcctgttggccttcatttgccaattgtccctctacagtagaattgattatggtcatgagtttctttagctactttccaggcctgaggatgtaattctgttcaattctgcagatagttactgagtgcttaatgtaattttaaaattatgagactacaaagatgaataagccttggttcttaccctcatggagctcaaaatttattttaaaaaagttaaaatagaaacaactacttatatcctactgttacaagtgctctgggggcacagaggtgaatgatttattctatcagagggagtagagaggcctttacaaagagagtttaagagttgaagactgaatgggagttttccagtctgagagatgggggaaggatgagttttccagactggtggaccagtgagtaatgtgtggcttggaatgaggagaataagagggcagtgggatggtaggtggggactactgtttaaaggactttgtgcatcatactaaggagtttgggttttatcctataagcaggtgaacagtgatggctttttgacgggggggaggattgagaaaaataactgacctggcagaaagctaaagccatgaagattggtagaagcacagtggaatagtccattaaaagatgccaggttcttaactaaggatgtcttaggcaagtgaagaaggggatggagaaattagaaggtcactgaatgaatgagaccaagggaaaatggagagggggaggcatctggtgttacggaaagttttaatttgggaactgggaaatgatcattgaaaaacaaacaaaagcaacctagtgcacccaggaaaaactcctgatttgcaaagggttagtgcatggagagaaagagctacgtatcagacatactgaattctatttgcccaaggacatttcaagtggaaatttcctatgttgattttacgtattcagttttcagaaaggattctttaaaaagtcatagcaatacaattcctgcaatataaataatagatcaatgaacatcatagggattagcatagttgatttgactaagcttcagattcagtttgagcttccctgtagccagggagataataggaaacaaagatttgtctgtctcttaatattgaattaaagaagcacgcagcatcctaaagaaacatcattgttttcctggctctacgtaataataataataacaaaaatagctgtcctttgagtgattgctatggacaggaactgttctgagtacatatgaactcctatttaatccttaaaacaaccctatgaaagagaggctgtttccagaggattacgtggcacagagtattaaggacacttcatatggccagcaagtaataggacctgtattcaaacttgggtggtggtcctgaactcttaagcagcgttacacttgaagtgattattggctagtgtccttatcaacatttttataacaaatcccaagggaaattatatgtggctgtttctcatggcctttgataattgtggaaagcttaacattaaaacaccaaagatagggtgacagttctccaaggataaaggtcactgttgcctaaaatgtattctgcagaataccactgagatactctgagaaaaaaaggattccaaggacagtaaaactttgaaagcactcatactggaaagtcatcattacgttagcatttgcactgaggagtttggaagtgaagaaacctgattagctttgtctaacctcatgttgctcccacttacttgacctcgagcccaactgcaatgttatatggaacacactttggtaaagaaattcaagtctgaagtaaactttgaaaaccagtctaggagatagcatagttgactctctactgtagttgttgagaagcctatccgttgtgtctctgggaacatcagaagataaagctataacaggtgcccacgtaggaagcctggatttttcgcacaaaagtaacttttcatatgctctagtggtgaagcagttaccctgtagacccagaagccagaatgatttagtctgaaaaatctaaagataggtattaaattaactctcatgatcatagaaaattctttgcaccatttttgtagaatatcccaccgaataacttggcttttcacccaaaccaccaagaaaaattgccaccagtgacttgatgcaattaacttgctatcgggagttctttcttgtgaaatgattgaactttgaaagatgtttaccaaagacagcacctttagcttcatcacaattactgtggaatctttctttgtaagtagttagatgcaaaggccagttgttgcttgaggcctctcctggattgtgattttaaagtgtatcatcaacacatgggaagatatttctccctctttatcttatgacagaaatgcaggtatagctttcatctcaaagtaagattaaggtataagttacaaagatgtgtagctactatatggtcctgtgtaatgctacttgaggaaggctgttcctttcctggcactgaaattttagagcttgcataatcagtatatcaacctcgtgtggcttggtgcttagcaagtttcagcttctagagcccatggctaatggagccatccaggagaatgttggagagataggtctgaagccttagaagagaagtcttgattaaggagtaatgagttgcgggaaggggtcatggttgtggcggagatggaagcctggggagaggacagagacctcctaggaagagagtttgtgtaagaagaagaccaaggacctcctgatgtacttgattgtaattgggcatgagcagcccagttagaaatggtttcctgttggtattacatatgtacatggatggcttctgcagatggctaaactcacccattttatttttttactatcttaatagttaaaatatgaccttttcttgtgtctccaaattctgagttaccttatggtgctagtctgtctgttgtaactacaagtcataagtaaatccatatgattcttttcctgtaatttcctggtaaatcaaggcgataatttcaaagataaaaatctgtatttttagctttagcagtgagcatgattcccagtctttttgccttcgagtaaggtttgtttccatggtggaagtaaacaatatcccacactctagaatgtgagctcttcaagggtaagggacagtgtcctacatatatctttatctccacagcactgggtacataaatgtgtcataaaaatgaatgggtaaatatcctttggagtttttctgttacttgatgggtttttggggttgattttcaggtatctcccttgtttttctcatttcttacattattttctttcccaaaatcccttaatatacctgtttagtttgtgatgtcattttccattagactgaaaccatccaagttgtttaggctaacccagacttaagcattttctgggcttatttttggactctttttaaaactcatcatctgaaaatatttaatgtccacacggataattctgaagacatgtgcataccatttttcttttatgtacatgggttaaaccttgatttttccatagtaggagaaagcattataagattttattgttttcactggggtaatatcttttgtgctataagaaataaaattttgaatctagaacttagttttttataagacctttattgagatataattctcgtaccataggagttacccatttacagtgtattagtcactgattattagttaataggttaaccagtattagtaatcactggttattaattacagagttgtgcaaccatcagcgcacaattttagaacatttttatcaccccccaaaagaaatcccatccccattttcaagtcactcctcgtttctcctgcaactactcttttcagccctagcagtagacaatccctgatctactttctgtctctatggatttgcttattctggactgttaatgtaaatgaaataatacaatataaagtcttttgtgactggcttctttcacatagcgtaatcttttaaaatggtatctatattatagcccgtattagtatttcattctttctttaatgctgagtaacatttcattgtatggatataccacattttttaatctattcattacttgatggacatttgggctatttctacttattgtctgttatggataatgcagctatgaacattcatgtacaagtaccggtaattattttaaagaagttattctgggctgggcatggtggctcacacctgtaaacccaacactttggcaggctgaggtgggaggatcacttgagaccaagaatttgagaccagcctgggcaacatggggagataccgtctctacaatttttttttttaattagccaggcatggtggctcatgcctgtagtcccaactactcaagaggctggggctggaggatcacttgagcccaggaattcaaggttacagtgagctatgattacaccactgcactccagcctgggtgacagagcaaggccctgtctcaaaaaaagaaaaaaaaaaaaaagattctatagtttctgtcattgtaatagaggaggccataggatcatatatggcaagagtatatagcagtgcatgccagggagtgaaaaataggccatcaaattgaagttactgggagaacttaagactaagtctaactacgcatgagggattgaagccgggacacacaaagcttaaaattatgattcttctagagactgttacggctttttgctgaccacagacaatgaaagtttgatattttgctgtatttgtctgaaaatggaaacacacttttcccaatggcagtattcctgaggactagagttcttcacctctaaaacctctccaatcctagtttttccttttggctgatgatgaccagccactgccatttttgtcttaggttttgttagtctgtcttatttccagttataagtggttaaaatttcttatgaattcttcttgtgttgaacttttgattaatacatttagtctatagacagtaatgaattagcatctgatcaggaatttgtgaaaaacatctcagtcattaaagattaagaaactgaagccaattaatattgtcatgttctgtctcttggaacttgagcaagatacagatctacgtgtcaatgacatatccagaaaatagactccacctagatacattaaccctgtacccttggtccacatattttatttcagcaatgatccatggacatattataatttgacagtttcatcacatacctagcgtattgggtcaaatcaaggaaatctcatcctagtgatcttaactcagtgatttcattttgcccagatgttcagctgtgataaactttactaaggcacagatgatggatgatacacaataattccaaaatttgggggtggctacaatgtggctaggggctagaactcaggtatctacaggacaaatactgagtgattagtcactttctaagcgctagatatgcatatgttctgccaagctcagtaggtctaagtagattgcttccatttcagataattaagtgctttctttttataggaagtttttagcacatctgaggttctaaatccaaaaagtaaataatatatagagaaagaagtaataacaataataatagtaaccaacatttattgaacacagtatgggctgggcatggttcaaagaaagtttgacatatagaatgtcgaccatactggcttaataatcctcataactgaattagtgcttaagtcagttgcccagcctcagcaagcagcagaggcaagtaagtcataaatcaagatcttctgaatccaagaccatctctcaagccttgttctaattctctcctcagccatggatggtgaaaggcaccacaaaggcagcgtgtcaaaaagtggcattgttcaacctttcccctgatggggcaaagcttttatttttttcctttacgttctttgacatctgttttaaaatgcagatatcactagaagaaatgacaactttattataaaatcccagtaaaatgtaaatgtcttatataaaacctttatactgagcaaatttcagtaggaaagggcttggaagtaaggctctgaatgttttaaagggggacagtgctaagaaatgattagaaacaagagcctggaggggtcctgccatttttactgttttgcttaaggctgacctaaaatatgcatagtcttacttctcaccctgtgagcttatccttattaatgtctttttccacctagtttaggggtatttttgaatttgtgtttgataaagatgtctaaagctgtactgtaaaattttattgtcacttttttttttaaatggagtctccctctgttacccagcttggagtgcagtggcatgatcatggctcactgcagcctcaacctcccagactcaagcggtcctcccaccccagcctcctcctcctgagtagctgagactacaggcatgtgtcacgacatatggctaatttttttcaatttttttgtaaagatggtgggggtgtctccctatgttgcccaggctggtcttgaactcctgagctcaagtgatcctcccacctcaacctcccaaagtgctgggattacaggtgtgagccattgcactgagctttattgtaatttcaagggctcaatgcaatttccagtttttaaagttcatcttgcttgcagaatttgtctttcatttaaaaaaaaactgctgattggctacatttatagctgctgtaatagttctgtatgatttactacatttgcctgaatttagattggtggatatgatttagctgcttttaatattatatgagggtaaagccagatttctttggatctattccttttagatggcaatctttgtagttgttctactttacaaaataatccctgtgtgtgctcatgctttggtatacagttaaatgtatgatactgttaagaaaacattgatcactggaaagtgaccttcatttctttatttcataaatatcattatacaactatataactacacgtagtagggaagctccatttaaagagtagatgacttacactgaaatcatttgacctttgtaaattagtttaaattacacagagattgttgtaatgttctttatcatacataatagttacgattgctagagaggcactcataaatcattgctaaaagggccagctgctttcatgttttcagcaggttgagttaagggaacaagccttgccaatttgattaatctcttatgtccattagttggttgggaagtttttttgagtgtaaatttgtatgtagacaacagagtttatattctttatgacataaaattaatcagatatatctacatatttgtagaatggggggattcttagctctatagagaataagaaatactggatggaagactttttttaggatgactggctacaggaagaaattgtagtgacagaagccatgtgtattgaatttgaattaatgttccttagggagctaccagagaaatataatttacaagataatcaagaacgtaaatagattctctgtggagtcgttgtctgatcactgacatatattcatctgtattgaaatgacttcatgactacattctaacaattagagaatcattaggggtgagatgtacgtgtataccttcaagaaaagcaaaatatgtattggtaataattgacagctgttaaaacgagtgcattgtgtacttgttaaacattagaggctgggcatgttggctcacacctgtaatcccagcactttgggaggccgaggcaggcggatcacgaggtcaggagatggagaccatcctggctaacacggtgaaaccctgtctctactaaaaatacaaaaaaaaaaagccgggcgtggtggcgggcacctgtagtcccagtgactctggaggctgaggcaggagaatgtgaacccaggaggcagagcttgcagtgagctgagatcgcaccactgcactccagcatgggcgacagagcgagattccgtctcaaaaaataaaaaataaaaaaataaaaaaaaaacattagaataacttaccttggaacagtaactctgagggaaccttgatcatttatgagaatgatctcccctacgttaatactgcatcaaaactaacattatggtatacctcaaaaagtattggcatagatgtttttaaatataagaaaattcaaatgcgtaattgataagggctaaatggctcaatttcccaacccctaacaaaaatatgccctaacacagctctgtgactatgactgcatttattagaaaacatttagtaaaaatcatctctagttcaaaccctccagcatcagttcttcttgataattctcatgaacatttagaaataccttaaaagagaattcagactcaaatcaaaaaaccttatttcatttggttgcaggccaagatacctcttttaaccatttctggcttttagaatccttatcatgacagcttgtcctatctcagagcttcaggaggaaaaactagtccctcaaaatcaagtttgctattgagcttaataagaggtttctgtatgtcatatgtttgtttagaagaaaagcacttgttcgactcatttaatcctggcctgatgaattaaggcttgaattaatactgagggaaccttgactatacatctacaaaatcaatgtgtcctggtaggcttctgattaagataacattagctcttgcttgaaggcatctttctctgctcctaccatttatccagtggtagataatatatggagtgaaaaatgaaaaagacatagctgggctttaaagcaagatgaacatctctgtgaaccagaaatgtgaaagaaaaaaaaaaaagtaagtggggctaaattagtgggctttcagctcgtgctgtagtaacagggattaaaattctccttacaaggtagtggcccaaagccaggattactatttgaaatcagagccccacaaaaacacacctagagagagacacatacacacttacacttaaaagcaacatgaaaagaaacagtttgctgcaagggtctacagcttatatgcagctatggccctaatgcatagagccgagggaagaggcaaagattcgcagttgggaaagagagcatcacagccttgaaaccaggacctgaaccaatctacctactgcctggcaatgaaatgagtgatatctctgtatcactcagtgtaggagctgcaaactaccaacagatgtggctctaaactctaagcccctgggtatggctgggagaagccataaaaccacctgagagagagataatgagtttaaaaagagaggaaaatattaaagtacacacacatgagaataatagaaaacatacacatgcatatgtatgcacatgcaaaacatcccttgcaaaatttgtctccaaatcacgatccaaaatacatgaagaaatgggatagcaccccccacccaagttaaacatcaaaaagtgaattaggctgggaacagtggctcacacctgtaatcctatcactttgggaggccaaggtgggaggactgcttgtgcccaggtgtttgagactagccagggcaatgtagtgaggtgccatctttacaaaaaataatttaaaatatattagccaggagtggtggtacatgcctgtagtcccaactactcaggaggctgagataggaggatcgcttgagcccaggaggatgaggctgcattgagccataattgtgccactgcactccatcctgggcaacagagtgagaccctatctcaaaaaaaaaaaaagatgaattaattctagaagaaagcaaaataatacactagtacaacaaagatttttacttacatttaagatgctcagaccaggtgcagtggctcacgcctgtaatcccagcactctgggaggctgagatgggtggatcacctgaggtcaggagttcaagaacagcctgcccaacatggtgaaaccctgcctctactaaaaatacaaaaattagctgggcatggtggcaggcacctgtaatcccagctactcaggaggctgaggcaggagagtcgcttgaacccaggaggtggtggttgcagtgagcggagatcgtgccactgcaccccagcctccatctcaaaaaaaaaaaaaaagatgcttaaaggcataaataaggggtaccactcgctaaaataacaagaaactaagaaacagagatggatgaaatgtaactaggtctgaaaacaaagatatctttgccaaaaaaactagtcattgaagttactaaactcaatatacaggataaattctagactttgtcctgtcagagaaggcaagggaattagaagatgatgctgagaatgttactgtgtacaacactcacagaaaaagataagaaatataaatgagcaattaggagaaatggagaattgaccacaggctctacaatataccttactagaatttagaggtttgtttaggagtgtatttgagaggtttcagaagaaaatggaggaaatggtagagaagtaatatttgaagctgtcatagctgagaatcttccagaattgaagaaggatgtgagtcttgaaggaaatgtgctcccaagagaaatttcaaacatctgggaaggaaagaaaggcctgcattgagcaattgatattctttacagctcagctttggctgattaaaatgagccttttctgttttcactggaaaccaccaaaacagaaatgtaatgtgttgtatataccaaaccatgcctcttgaacaagggtccttataaataaatcataaaagaagagccctgtggacaactaaacccacaggatcaagataccaaggaagatctctctagaaaaggcagtctcctgtcagcacctttgtgaaaaataggtgggaagacagtaatggcttgttgtaccatcttgaggtccatgtctaaaaactgttttcaaaaggaacaccatggctgccccaatctggtagaaagaaaaatttgaataggattctacataaaaagtgttgccagttagaacattttgttgaagttttcttttaatgaagagggaaaaatagaaagtaattcctatggaatgagaccttgtgaacattggatactgcttcaagttcacagaaacattgaactgattgccagttaagttctcagaaattagatttaattaatgtggacagttacatacatcggtgcacacccagaagacccgtgtgcagaatctgactgaaggtgtacttacttcgatgaatctcttctcatcactgctttgtcaaagcagattgctatgaaataaactatacaaacaactacccttgaaggctgatagcaataggatttcaatcagtacagataggagattctatttctgtagatgaaaaagatcatacattgattttctgtgtgactttaaataaattcctggaaaccttgtaatgttaggtactaggtagaatgaaaaaaatgaagcaaaacaaaacaaagaaaaaaaccagagtagattgggttttctttctgcttccatgtggagatctagccttttgaaactgagcattttggaagacatgccgtcccctgtggaatgttcattccgagtatgggacaacagaaaatatttagcagacctggtgatgagatgatcttgctttctcaaactggacaatgggaaaactcttcttggctactcactacttacatttcatctcttttctcattgatatagatctcccacatttgtggataggaatttctctcacctgatgaaatatcatctgtgaacaacagaaatctgtcatcttattttggtatttatcacaagtagaagaaagatgtcaagagttctaatcagtcactggatatcaaatatcagaaatgtcctcaattggaattgtattctcagtaaatcctaaagcatttgggaccttcacatgtgctaatactgtttatatttatttggaaattaaccaaatataaccaaaagacagtggaataaccatagaaacctttaaatggaataaaatttatggcaatcaacattattaggaagaaaaagtatactacctagaaacagtgcaagaacaacgaggatcttctgtgcatctaactatataggtctagaaatatataaagtgaattatgatagaattaaaaggagaaactaacaaatccataattatatctcaacactcatctaacaaaaattgatagctacaaataatcaaaaattaataaagatatggacaattttaacaacaaaatcagcacactatgtatttagagactccatctttccaatggaaaaatacacattatttcaagtactcaatgaacatttttagaaagtgactgtgaactaggtcacaaaaagaagtattgctaaatttcaaaggatcagtatcatacaggggttctctgattgaaacgcaattaaattagaaatgcactaagaagtgaaaatggaaatataaccactgtgctcctaaatgactatgggttaagttaaaagaaatcacagtaagaattacaaaacataaggcactgaattgaatcaggtgatgtatataaaaacttttggtatataattaaagtggtaccaaggaggaaatgtataaccctaaatgtgttcattaaaaataaaaaatcaatgacttattcaacctgtaaagcaagaggaaaaaaaagagtaacaagtaaaacattattaatggacataaaatgagaccatagtaagtaaggagcttcactgcattcttggatgtgaagactcaattattatgaacttagttcttcccagtttaacctatgaattcaatgtaattcaaactcaaaatttcaacaagcattttcataaaatcagaaaaccaaacactaaaatcatggagaagatcaaaggggtcagaatagtcaagacaattttgaggaaaaacaaagtgggctgagaaggcctatcagacatcaattgatttaaagctggagtgtgggatctaccagggatatgcagatagaaccacagactagaatacagagctcagaagcacacctgtatatttatggacacttgatgttttgcggaagcatcgttagagatcagtgggaaatagatggaccatacaatgaatgaggctggcttcatagtttatccatgggggaaaagtaaaattagatcgcatgttcacggcaagcacaaaaatagattctgggtaaattcaagtcctaaatgtgaaaaaccaaattttaaactttaaaatgtaggtgtaagaaaagattttcgtgaacaaaacataaaaagcagagaacatacagggatatgttaaaatttacatcttttataccataggatgccataagcaaagttaaagataagctacactaagataagggtagaagatcatatttgccatgcacataactaacaatggattagcatctagaacatatccaaaggtttaaaaagaaaaagacaatccagcaggaaaatgggtaaaggaagcatgaaaagccagttaacatggaagaagtctaaccttgccagtaatccgggatgtatgtgcaaattaaaatgcacccatcaggttaactaaaacttgaatgtctgataacaccaagtatttggtgaggaggtgggccaaatggaaaacctcattcactactgaagcgagagtaaattggtaaaagcaccgatttgtcacccagagcgattcggtgacatgtagcaatgttgaagatgttgctaagatccaacaattccacatcaaactatattctgtaaagaatctcttcaacaggtatccaaggagataggtataaaaaagaatttcattgtatcattgtttataatagtgaaaagttggaaacaacctaaatgtccatggacaggaaaatgttggcatattcaagcaacagaataataataccttatggcagttaaaatagcaaactattatgtatcgacctggagaaatctccaaaatggtgttgaaggcaaaaagcaactcttagaatggtatgtatattcttaaatgtgaagttcttaaatttaaagtttaaaaacatgcaaaataatgttattagattgaatcacataaaatgggtgtttttgtaggtgaaagaaaaatacaggcaaacatcagcatcttttttaagctcaacctagtatttgttgatacattcatggtaacactgggcatgaaattcagtgtggcattatctccttgagggcagcggggaggagagaatggtatggtgttgaggcgggcatgtgagggagcttctgctttggctgttaacttttctttcttcaaaaaacttttgaagaaaatatggcaaatgataaacttatcaaggggaggtgataggaacatgggtatacttactccattcttatacatttctgttgaaaatatttgctaatgtttagagcaaaccaaagtgttgatagaggtataaaatttttaatctcatgacattataaagaaatatttacaaagtgattaaatcctttgctgcttacttatctgaacataccagtcgcgaggcttttagtgtaacataaaaaattgaaaagcatggctcccttcacacaccaggcaaaagcttcaaattttgttttgttcttttagcactggtaagattgtcatcattaaaaccattcattagtgcctcttttgcttgctgttcttcggtggcagtcagatgcatctatctaccatggtatataaaatttggtgatgatattcaaattactttttttcttctttttctttttctttctttttttttcttttttacttttttgatgccaataggaatctgcaagcagaatatgaccgtctaaagcagcagcacgaacataaaggcctgtccccactgccgtcccctcctgaaatgatgcccacctctccccagagtccccgggatgctgagctcattgctgaggccaagctactgcgtcaacacaaaggccgcctggaagccaggatgcaaatcctggaagaccacaataaacagctggagtcacagttacacaggctaaggcagctgctggagcaagtgaggagagagatgggatttttacaaacattcatttttccctcttaaacaaaactaaacctcagagagcactttttataggtgcaacaagcatcaattcttaagtgcttggtatgtgcctgcaaagtgatagtatcaaaggatagaagtagaggagatagaaaaactagtgtgtcttttttgtatttgtccaatattgtttcctaccaaaatggttttttcttgaccaatttgaaatacatcttggggaaaaaaacgcctaaaggtttccactagttctctaaaagtgaatatttcacttcttgaaatggaactatttcatttacaattagttatattttctggtatacctttgtgttttttttctcctaatccctaacacatagttctttaagcctccatcgaaaacctagcaagatactgcattgtaagaggacctacctggacatagttctggctttctgggaattttaaatttttcaattatgttctctctatcttgttacttaatacttcacaaagatatgaatcttccattacagttttgagatctcacatagtctcatcattcacacatgaccttctaaatcttccagttatttaatgtaatgatgtatagtctcattccagtgtagctctgatttttttctcaaatttataagggagcacaattcagatacaaagacagtttctatggattatatcaacagtgaaatatcccaaattaaacaatctttgggagggcttctaaagtaggaagggtcaaaatttatgagtcctgagtgtgtatcatattttgaaatttatacatttgtatgtttattatgaaaagtaattctgttttcttttggatgacttagccccaggcagaggccaaagtgaatggcacaacggtgtcctctccttctacctctctacagaggtccgacagcagtcagcctatgctgctccgagtggttggcagtcaaacttcggactccatgggtaagtgtcctagctactctcagattttgttgtctgaagaaaggtagagtcgtattacagggacatgaatatttggccgtaagtgtttgactcatcttggtatcagggagccactgaaaatcatataccaggcgaaaaaagtctaaaaagaaaattctaaaaaggtgtattctggcagctctatctggcccacagaaaacttgtataggtgagaagaccagttaggaggcaattgccaaggccaagattggtgagttctgagggcctgcacttgagagatgtgggaggagaggactgtgagactattctataaaaatagacttgccagggggctgggcgtggaggctcacgcctgtaatcccagcactttgggagggtgaggtgggcggatcacaaggttaggagttgaagaccagcccggccaatatggtgaaaccctgtctctactaaaaatagaaaaattagccaggcatggtggtgggcgcctatagtcccagctactcgggaggatgaggcaggagaatcgcttgagcccaggaggcggaggttgcagtgagccaagatggcaccattgcactccagcctgggcgacagagcaagactgtgtctcaaaaaaaaaaaaaaaaaatagagttcccagggtctggggactgagtgcaaattgtaagaagaggaatgaagggagaggatttggttggaagaagatagtgaaacttctgattgtggacataatgtgtttgagaaattgacaggtcttctaagtcatgtcccaaaagaaattaagatacagatctatacttgaagtaagtgggcaaactggagagatttgagaatgagtttcatagaattgattgctgaagggtgtgagatgagaaatctataaaatctataacacaggtgcttcgatccagtgccttggaaaagacctccatttgggtaatgggatagtaaaggatggataagtagggaggttcaaggaagatgtgacaaaaaggtgaaatgctaaagagagctcaatggaaattaaaataaatcacagtccattgggtcactataaatgcattgggtaattttgagaaaccattttaggccaagagaagggaaggtggaaaacttctgtttcaatgaaatgaaagactaggtaatcttaaaatgaatgaggattaaggaaagtgaagacaattttgaaacattaccaagtaagaaggaagccttaggcaaaagttggatgaatttgttgaggaaatggtccacatgttctgttctcattcttagcaatgttctctgcctaggactaggttctaagaaaggtggagctgatgaggcataaatgatcaaaggtcaaaacaagagtagggcattttacagtggtaatgaatggctaggacaggggttcctagccagctgctcattggtttttcctgctgtgtctggctagacaatagagggttttatgaaggccacaaatacttggtcccccttcctcatttctctttctctgtaaaggcccagtaggagtcagctccatcctctctccttacttttccctgggacctaaactggttatatacttggtcctctcaaatcttacctcacagaatagaaaagacctgtgactccttgattccatacacttacagctctattgcctgatatgatgatgtgttcaggaattcatttcatacttgagctcttccatgagggtagaataaagggaggcaaagtgccttaaccaaaatggataggacagaaaggaaaagtcaggggtgtgggtgagttttatggcgaaaaatttggagatcacagtcgggaaaattcaaaagttggatatcatggaagtaaaatactttcaagcaatttctacatctaacatggtgcctcccagcgagctgctgaagattttacttggagatcactgaggggtagggagtacagttcatggagttgatgagaccaacgttgctgagcttatcagcagaggggtgaggtccagatcctgacgacagtggtagatcaggatggaaaagatgttgaagaagatggacgagggctctgaggagatgaacatttctgaggaaagagacagggtagttgaaataaatgtgatgaagttcaagaacctggagcagtgggaagaggcacatcctcctctggagaagccaaatcttgtaggaaagccaggttttgatttttttgagaaggaaaaggatatgtttgaggttattttcctgaatttactacacctccatgatttaaggcaatctctgtgtcagattatctccctccacctgagatctgaatatagctaataaactgttgggattgtaaatgacaacacactacatgaaaaacaactgtatgcatttgcaaagtctgtaaattctgaaaacaactgagctttagtacctcttatttttttctacttcaggattttcccccttttttaagtaagtaaagcatatgaaactaagttacatattttagtggtcagattcagagccctgggtgcttagaagcattaataattatttaggtcgttgacaatggcgaataggcagcatactcgttaaagcactcaaattaaagtgcacattaggatgtggtcctgatgatctgtggagctaaaaagatcatggtagaactgaataccaggacaaaagtgctatattccaatggctaagctaagagataacttgctggcataaaatggataagctgtgttaaatttgtcctctgaaagaaaagactgaattcaagggtactttttcttgaactgtgtattaatctgttttcacactgctataaagaactacctgagactgggtaatttatgaagaaagaggtttattgactcagttccacaaggctggggaggcctcaggaaacttacaatcatgggggaaggtgaaggggaagcaaggcatgtgctacatagcggcaggagagagaaagcgaggggagaactgccacacttttaaaccatcagatcttatgcgaactcactatcatgagaacagcatgggggaaaccgccgccatgatccagtcacctcccaccggacccctcccgcagcacatggggattacaattcaacatgagatttggatggggacacagaaccaaaccatatcgaactgcataagctaacttcatttaaaaaggaaaaaagccttaccgtcttcttgaaggatgcacacaggtgtttaaataaatgcagtgtatatacttgggctttgaaggtttgagatacaaggctgggatctgctgaaccacattctggatagagctgcattctttaaatatgcaaccccgatgactgattttcttttaagtgaaacatgagacaagtcatattaggtgatgtgtctaaagagtcaacatatttcctcaagccatgaaatacttatcactgagtctctatgtaccatttgtattctgtacagttcttactgagacaatgtgctaatgaaacgtacattctattggaggaagcaaatacagaacaaaatagcaattaacaatgtttatcccctattggctctcatgggctccatatacaaatctgtgatgtccagacaactccttatctctgatgactcctaactttccaccagattactgttttttgaagcattttatattttattgatttaaaaattaaactgttcctttgctttttaaaaaatttatcatgtacatttgaggtttatgacataatggctccctagctttttatttagaacaatttcaaacttatggcaaaactgcaattaattcaacagtttgccacatttgctttatagctatttatttatgtacttttacattcatgtgttgttaaatggattgcatatatttagattaacatgtatatctgtatgttaacatatttttatatactgtatatgtttatattttatgtgcatatttaatcatattcatgcgtgtatatagtttgtggatttttttttcactgatccactcaatggttaggtttcatacataacacttcacccctaaacacttgaacacgtgccttctaaaatgaaagatattcttgcataagcacaattatcatgctcaaaaagaacaatactgttatataatgtagaatttaaattcaaatacctccaattctgccaattaatattcttcatagcgatattttacattcaggatcagtgatgtccctgtagtctcctttaatctgaagcactttcccagcctctttaaatctttcatgacattgatatattagaagaggtcgggctagatgttttgtagaatgtcccccaatttgaatttgtctgcttgtatccaagtgattgggttcgggttaaatgttttatgccagattaccatataggtaaggtatcctcagtacatcacatcaaggttttcctcaagattctccatccccttcaccgttcttcactctccctgggcgctccttccatactttggcttctgctatgctgacaactcttaagtcaagatttccagcccagacctcccacctgagcatcttctggataaaattataaataaaaatatagcctaatctgaaatcatgatcaacctttggagcatctcttccaatttcccaatctatacaaagtcattttctaccccttcttcctttacctgccttccttagctatgttccaccaccatcaatccagtcaccaaggtcagtgtgttttgctacttatgaaaaagagcaaaattcttcaattcagctacttctgcccaaatttagccctcatcatgtgttacctgaacagacaatatgaatactttcctaattggttcctctgcctttggtctctctccctttctaagctatcttccagaaacttcagttcctcttctaccattcaaattatatcatattattcccctctttaagcattttatgccttctgtttgacaacagaataaatgtgctctttggccttgagtacattatgttcttaacctgaaatatagcatcctttcttttcactcagtgagttttcttttggaacttaatcatgcattatatcattctggttttgttgttgttgttgttgttgttgttgttgttgtttcttttgtgtgagacggagtctcgctttattgcccaggctggagtgcagtggtgcgatctcagctcattgcaacctccacctcctgggttcaagcgattctcctgcctcaccctcctgagtagctgggattacaggctcgccaccatgcctggctactttttcttgtatttttagtagagacagggtttcaccatgttggccaggctgttcttgaactcccaacctcaagcaatccacccgcctcagcctcccaaagtgctgggattaaaggcatgagccaccacacccagccatgttttcagccagttactagtacttctttcttctgcctacaactccctagaacttaagctccttaaggacaggatgtaagtcttgctcattgtcgttactgtatgaggatactctgtgcaacaaacaatcagtaaagtgcttgttgagttaatattttagaaatcaagcataatacattcttgtgtacacatggaacagcccacacgtttaggaaatttagctactagtttcagtatctttcaccaccattcacaactgatcagctaataatcagcaacaacattgtacaccataatatgttaaaggtgttacacacagaatttatgtgtgaaattgaaagcatcggtcctatatcatatggaaaaaaattaattgtagccaaatgttgggtattggatacatcagtgtgctttttcttctaaaaaatactggagaaaggcaggaaatacacaagtactaagataataacacatcaagtcggaaactggttaaaatccaaagaaaaatgttggtgggcgtatttgttcatacacagccccctttatgagaaaaaataatttcttgtacacagctcctttttaaaaaaaagagaaaataatttgtttagattcagacaaaaacacaggagtaattcttgtgtctattctgcataggctgcgtaggttctggctaaaatcactttttaagcagatagaaccattatcagcgtttgaatcaaagggaagtgagtcagatgggatatcttcccttcaagaaagggatctgaaaccatcgttatatttcagaagactgaagaatatcttgccatggcaaagcattccttttcttttttctcggattaaattgagtcatcccacttcttttttcttcacttcagcagtgattaaaggagactatcatattttgctatatcacggtactatttaactttgactatgtctttccttattttaaaaaatgtttcagtgatttatttggaccacaatcagacaagccaggaagaccaaatagctaataatccaaaaaacattatttttctctttttattatttcagtagttttcagggaacccaggtggtgtttggttacatgaataagttcttcggtggtgatttctgacatttgggtgcatccatcacctgagcagtgtacactgtacccaacgtgtagtcttttatccttcacccccctcccacccttccccccaagtccccagagtccatggtatcattctcatgcctttgcatccgcatagcttagctcccacttataagtgagaaagtacaatgtttggttgtctattcctgagttactttacttagagtaatggtctccaactccatccaggttgctgtgaatgccattatttcattcctttcatgactaatattccatggcgtgtgtgtgtgtgtgtgtgtgtgtgtgtgtgtgtatataaacaccacgtacatactgcattttctttatccactcgttggttgatgggcatttaagctagttccgtatttctgcaattatgaattgcgctgctataatcttggtatgcaagtatatttttcacataatgacttcctttcctttgggtagatatccagtagtgggactgctggatcaaatggtagttctacattttagttctttaaggagcctccatagtgttttccatagtggttgtcctagtttacattcccaccagcagtgtaaaagtgttctgttttcaccacatccacactgacatctattatttatgcatgtttgtggaaatcaccttggagtagagtcaagtttaagtgttaaagcattgccatcaactaagtttaaaatcccccaaagactagcaatatgctatttgagcaggcaatgaatctgtgaagtagggataagggctgtgcaggtctctagtgtgcaactggaactcagtattttcttgttgaataagtgaaaaaagtgaaaaggtgtttttgtttttggtgatgaggggcttgtgatgacaggtattattgttagagtcagaaatattttgaggttgcctattaatatggtttggctctgtgttcccacctaaatctcatctcaaattgtaatccccacgtgtcaggggagggacctgatgggaggtgactggatcatgaagaagttttcccccatgctgttctcgtgatagtgagtgagttctcaggagagctgatggtttttaaagtgtgtggcacttcccccttctctctctctctctctctctctctctctctctctctctctctctctctctctctctctctctcctgctgccatgtaagaggtgccttgcttcccctttgccttccaccatgattctaaacttataatcatgaggcctcctgaggcctcctcacgcatctggaactgtgagtcaattaaacctctttcctttataaattacccagtctcaggtagtatctctatagcagtgtgaaaatggattaatacacctattatgttgtagctacatagtgtatgattagacaagccataaatattatatctggcttgtttcatgcccataatagtgtatcagtcagctgttgctgcataacaaataaccacaaaattctcaagttgcatatttctcattcacgcatctgttgtttggctgaacttttgctggcaatcagctggacttgacaccaagttgtggtttgggttcaggtctgttcaacatgtctctcatccttcttgggctagcaagctacctgggccatatgcttcttgtgcacataaacacaagcgggcaaccccaaccagtcaaagacattctaagcctctacttttgtcatgcccgcttacattccattttccaaagcaggttatgtggccaaatccgaatccccaggccagggaagtactgttttcccagctcttgttcactctgctttatctacattagacttcttgctgtgcttgaggaagccagtcacactctcctctcagagtctttgcatttgccaatccttctgtctggagcacttttccctcaaatacttgtgcaactcataccctccagttcttaaagcttttgctcaactgcatctcatcaatgaggacttccaagactccactttctgatgactctcattgtcccttgctagccctctcctcagagtgttcatcaccactcaagatacctatatagtttacttatttacttgttaagcctgtgtgcctccttatgaatgcgagtttcacagagagagtgtgtgggtggggtttgtttgcttattgctatatcttcagtgaacaatatgccaggcactgttcaaccatttgaacagtgcctggcatatatagttggattttaataaatatttgaataaataaatgaatcttactgtttttaaacttttgtggtttttaaaaggcattttaaaaatctgggttagtatcaaatattacaatggtattactttaacttcaggtttcatttagctgttttaacttttacaatatattctgacacagaaaatattaggcattaagcatttttcaatgagttgattcacttctactcatgcacatatgtgatgtctgatttcgattcttaaaaagagatgagcctgggcgtggtggctcacgcctgtaatcccagcactttgggaggccgaggcaggtggatcacgaggtcaggagattgagactattctggctaacacggtgaaaccctgtctctactaaaaaatataaaaaattagccaggcgtggtggcacgcgcctgtagtcccagctactcaggaggctgaggcaggagaatcacttgaacccggaaggcagaggttgcagctagccgagattccaccactgcactccagcctgggtgacagagcaagactccatctcaaaaaaaaagaaaaagagaaaaaaagcaatgcattaaaaccatcttgagaaatcatgaaaatatggagaaaagaagaaaacaagattatactctacttgtttttatactacctagaatgtaataggcactcaaaaaaatgtctgaatggatacaattatcactgccttaaaagttttccattaaagcaaagaagccaattttacatttgtattatacttggacactcatattaaagactcacagagagtttatctggaaaaataaacttggctgacatcattaggtttatactttataatttgatctttgaaataattcaggaacaggaatgccagtcacttcattgaactgtacctgaattttaacacagtacaattgagttcctagagctccaatatgatgtaattaaactgtcagaaatattaacatcgatgttcatgagcgtcgttcatgatgttctcttggttctgatttattcagtgaggcatactgtcactgaagtggacttactgccattaaaaatgcctcatgtttcccagttccgcaaaaatttgcatcagtaatgaaacagagagatgtaatcagccctgcagttgtcaggatcttgatcctcttggtagtatttcattcatttcatcttcaccagataatggtagtttaaaaccgcaagaaaaatgaaactaaaaatagtgaatttcacttctttttctaaaggcataaacttaagcaaatagtgcatgtgtgtgaggggggaggaagagagagagaaagaggagagagagagtttgtaactattccttttctgctttgtgaccttaattcttcagcacccatttcctgtacttaatattgcaaagaggtttcctgtggtatgttaccaggagactcatgtagtctgaggctttttatctaccttacgttcttatccctccattctaataaaaatatgaagcctcacatccacctagaatatgattttgtcttaatggttagcattggcaatgattcttttagcttctgctgttaaaaaaaaaaaaaggaataaatgcaggattctaatcaaacatgaaaatccaagtggcatagaccaaagggaatgagaagcatatttaagtcatttagtcactggcttccgaagcagttccaagtcagatgtaaacctgaggttgtccctaattaagttcattatggttgacttgctaaagcaaggtcttgttttagatggaagtgacaatgtgcaaaacaaacagagcttgaatagaagttattttcactattggaagattgtatattatgaaaagttagtttcaaaggacctttaaagtttaattttgtttgcacctaagaaatttccctttaacttgcaaatgctgtttgaagtgtatttctttaacacatgaacaaacaatacagacacagattcacaaaatctacaaggagatttccattcccagtgaatatcatccatccataggtttctttgcttccagatcatcattctctcctcacataaacagtcaaaatgtttgtaatgtcttctttataaaacccaaaacataattatgataaagtagtcccaagtaacagaggaaaggaccataactctccaatatatgccatatctacagtttttagaatattcatatttcattacctatataggatatatactatttttatttctattacattggagtttaaaggtacttgagtttcgtttgtatttttggttaaatgtcaaaacaaagagtgaaaaaaagacctcagtgtctcaactcccttcttaccttcatgaagtgactgcaaagtgttcaattcttactcttttgtgttgaggagacagcactgcaagtgtgcagtaatacttattttattacatagaacaaagtttcacatttgtgaatggggcacaaaagagagcttgtcagttttacctttttcaattgactttttcttttattctttttaacttttaaatttattttttgtttttttgtttttttgtttttaaatagagacagggtctcactatgttgcccaagctgctctcaaattcctggcagcaaacaatcctcccacctcggcttcccaaagggctgggattacaggcatgagcgaccgcacccagcctgttttttactgtagtataatatttgtacatatttatggagtgcatttgatattttgttgcatacacagaatgtgttaatgatcaagtcagggtatttagagtattcattatctcatgtatttatcatttctatgtgcggggcacatttcaagtaactagtcaacttttaaaaagatacgcagtaggctgggcgtgttggctcacgcctgtaatcccagcactttgggaggctgaggtgggcagatcatgaggtcaggagttcgagaccagcctggccaatatggtgaaaccctgtctctactaaaaatacaaaaattagctggacgtgttggcgcatgcctgtagtcccagctactcgggaggctgaggcagaagaatcgtttgaacctgggaggcggaggttgcagtgagccaagatcgtgccactgcactccagcctgggtgacagagcaagactccatctcaaaaaaaaaaaaaaaaaaagatatacagtttttttttctccaagggtaatgatatagataaactactgtatggatttcttcttccctttaaagaattacttcctcattattaagcttgagggttttctttgttatttatgagcaagtgaaatgaatttataatggtgttaaaaatgtaatcatggccctttaatatctgttttctataaatgtaattttccattatttgtttttgcttttattaaggtgaggaagatcttctcagtcctccccaggacacaagcacagggttagaggaggtgatggagcaactcaacaactccttccctagttcaagaggtaagctccaatacctagaagggactcagatttgctgggatcaggccactcgcttccctacccaactggtgtgtgtattttccatatggaagccaacacgcagtatcagaatggcaatttgggtccatggtgaaaagatttgatttttaagtgtgaatttgtggtttagagtactctgaattcaaatacccgtgagggcaacatgtttccaaaaataagaataccaccctctatttgtcaagtattttacttgcttcacacattagtctgaagagttaattatgaggtgccctttactgaagagcaattattatgtgacttttacagatgaggaaattaatgccctgatagtgcctttgccagggacatatggctactacgtgctacagcaaggcctagaacaatgcctactgattggtagtggtagagattctgacttgccatctgatgccctttatatttaaaaattgtatcttactccatcatttaaatatagggacaattaaatcttcatagagtagttggttattttttacttcgatagaggaaatacaggcttagcaaagaaagacattaatatttttctttttcttcatcactttggccttgcgtattttacccccatacaaaaacagcattttaccctgcagaattttcccactggcttgcatgagcttcagatgtcttgcttcatccaagatgatgttttgctgctactgttcgtttctgggggcatttatttggtttattgccctcacataaaacaaagtcactctctcgccttccttcaacgaataaaaaggatggtggcagtcacctgtgatcaaatagaagaaaagcctagagaaacaaaagggagaaaacacaaggctttgtggccagtgattggcacctctaatgggtagcctgggagggacgggcagcaggaaatctgggctgtttgttcctctccataagggcaatgaggagggtgtattgagtagtgtgtttttcctatctttttgttcagtgtcagttaacaatggccatttcctagctatttgatgtgcaagtaaacgttgtgcagtgcacattaaaagcaataatgttctggtagagcgttgctaaggaaccgtcaggggaagctaattttaaatgtctgcaccagccatcttttcactgctgagcgccactgaagtgatgattttaacagataaaaatcttatctgtcttccacccacctccacatcccccaccgccacccgcatccccattctgactatcttaggtatctccttcttctagatgtcataattcataatgagaagatcatacacaggcttgacagaatcaggtgctttcacgtgtctcctcattactttgtcctgcttgcttttactagcacctactacgtaccagtggaggtagtagggatggaaagaagaaatgacaaattccttgccttcaaggtacttatggtcaattgcagatacagaactccaaagaaattcaaatcacagtacaatcattgattactgtatgatcctggccccttgaactggcagcttgcttacctgctctggaaagttgctggctgccctgttggcaccctgggcatttcttccacatctaaacaagaggttagtagagaagaagctacagcaaggctcatgactctgcttcttcataggcagccttgacttcctagactcctttttgtacctgagtttctggtccaccctaattagctgtaaggtgaaatcctttgcaccatctccctgtgtcccgcttttagagtccttaaagctagataccacatgggtgtagaagcttcctggaagacaagaaatatacctcctctgatatggtatttagcagtcagtatctctgatgttgatttacttacttgtatggaaacttgggaaactcaattcaggccacctggatagtgtttactaaattagtgcttacggaagaatttcaggccttaagggctgatttaagttctcaaatgtgggagaaggaagccttgtccgataccaattccattaacttaagttccggcttactcagtggtacccttgtggcctgagaaaataaattcacattcttaaaaaacaaaacaattaaatacacaaaaaacacaagagagtagctaaggtattggaaaatctggcctatcattctgtaataccatgatcttggcatttcctcacgttttgctactttcagctaactcaggctttcttacaggcctttttctccccaaattcaagtggataaaaagtttcattattgtaaaaattaggctaattattgatgcactcaaaaaagtggtttttggatgctttctttccaactaaaagcacttttgttttttaattttgaaaaatggcatatgtgtgtgtacacacacatataccgtcaagtttggcgggaacatcttaccagttggtagatgtgttcagctgatattaagcagaaattcttgagaatcttaacatcttgggattacaaagtctttcaaatggaagagccttgaaaggtcattttaacacttttgacatccaggacagtgatttctgactctgttttgatggttatccatatcagaggaacattttacatcacaaactggggtaaagatataaaataaattgtacatgtgtttatgtacacacatgtatatatacacccaccatatgtacacacacacatttacagtgtcatatgcatacaaagatcagaaacaaaagtttcatcaagtgatgccttccatactacatacagtgcatgctgtttttctattttatttatttaaaaacaaaatgctggttgcaacccactaaatggattttctgaaccagtggtttaaaaatactaatctatgtgatctcagtttttcttgcctggttgaattatctttcaaaaaaatttaaattttgagatttttgccgtggaagtttctgccaagacgttgctaatgtctcagagacctttatagttttattctaacactaccatccatgttctcattgttgtgttacaaaaaacaaagttcatgattgctacagctgttttggacagctgtttgagtaactcaaaacagatgtgagagccagaggtctgacatttagtggaaatgtgctattaaataccaccgcgtggtttacttaaccctgctagataattgcccacagaggaaaagccgtttttaaaaaacttatgctcttcataaacataaagtatatagataggtaagctattatgtacctcaaatttacaacttttctgttgccccttgccacagagttggtcctgaaggtgtcagctaacctttctttatcttttattttcacaaagagtacctggaagccaagaaaagtcaagtgccttatttatggccattcagcaggttaagttaggcttctaatcttatcttaatggctttgctaaactgttatcaaaattaataaatgagtggcatgcttctccatttagtgataaaccgatggccaacactatcctgcataataggcaatataagcaggagcatattcaagatatgaatgtgtaaacattcagctttgtgattatatctttctggttggtctctagatatacttagttgttcacaaacacttgggagatttgagtggctcagtgtatatttgaacactgaatattagccaatttctatctaatctgtctatctctaatctcttcctttgtaagtatatgtgtagaaattgaattatagtgtaataagtcattatctactttactataaggtactctctaaagctctgccattctataggaaaactacatgggtacaataaacaaacgtaatttaaaaaataaccccattaagtgatttgtccataagtctctgatcatttagcagactaacaaagatatttttatatgtatgtgcattgatgaaagaaacgctctcctagtcagtagtatggtattaggctctctaaaatgtggtaccactttatatagatgaatgaataataggagccaagataagctcttaatgcagtaaaacaatccagaaagcagttagcagtgctactatttctgctacctgtacaatctcttgcctactgacctgtgccacattatctccaccagcccatgccatcctctttttttcataccatcccctctcaaataagcccgcgtacattctatcaaatacccctaaattaccaacccaacagctttgtaaaacctaccgtcttttaaaattaaaatcttattctgtggttcttttatggaagagcaacataaagaacaaaggcagatagaaatatggtgtgccctttttcaggcaccattctgtttcctgtatgctcccacaaaggatttgagcggttatccctttaatccaggactagcaaactacatacagcccaaatgccaaatctggcccaatacctgtttttataaagctttattggaacacagccatacccattcatttacatgttgcctatagttgctttctcattaccagggcagagtagttgcagcagtgctgaatagctggtccagagaccgtgggcttgcaaagcctgaaatatttactatctggccctttatggggaaaatttgccaatccctgctttacgctattatttcgttgtccattctgactcattacatgtatagagtcacaggcttctgtgctgatcaactttcagctgaacaagattattgagctgaaattgaattgatttatagatttatattcatattcaccaaagagcctgcaagtgtggccatttgaatttttttgacttataaaataacagaaatcctaaaaagggacttattcttccttaagtattttaaatagtcagtgaattaatataaaagaggctaaaagcacccagaaacagtactgtcctgcaattccaactctaaaataatgaattacaatcaataatgtcaattttatagtgcccgaggaaattagacttctcgggacctgaccaagccctttatttagactcaggactgccccagcacacttcccttttgtcttgattcatttcctgacaacacatcacattgccagatggacactgtaactgaaggtctacagaaactcatttccaaaaaaaaataaatgtttagaaaatgaaacatatctgaaactttatttatcggtcaagaacttttaaaaatgttgtaatcaagtagcctctgttttgtcagcgtagaactagtccttttacagtagaaaatatcatttgtttttaactttttctaaagtgaaaaaaaggaccttccttttgtaatgtgttaatgagtacgtggggacccaagtgatgagggaggattttagaagagattagagttagcttggctctgggaggtccattttcataaaatatggtttctgaagaaggatctggaacataacacaagtcatttgctgctacatattaagaaataatcaattgataactgagttctgaatatggcttagtgtagaattactaaagatatgtatcattaagcattcaaagaatcatcgttacattctgaagtacataaccataattacattctaaatcacatggctttctaacaacactgtccttcctaaagatctcaagttttcaaaactagaccaaagttacatgccgaaacaagttacccacctttggcatccaaactaaagtgtgccagtgaagggcaagttacttataacacagaaggactcctcttggtcatgacccaactactactttaccaattcacttcagccagtatttatcaaataccaaaagtgtgtatatacggtacagggcattgggcatagagaggtggatgagcaacatgtggaccccgtcctcaagaggcttatagtcttacaggggaagggaattaattctgccaccagacagtattatgaaacataaagatacttttttaaaaaaaccttgctaaaggaatcaaaaagaaggggtgagtgattcatactgggatttcagccatcaaggaaagaatgatgttctcctccccaaatgatgggaacatcatttggtatggatctcccactagtgacacccacagctgaggagctagtacccatttttctccctcttttccctggcttgaggagcatcttaaatacctggcccttacgtggtcaagctgaaaatctgatactcctaagaaatcgctgagtcatgtaggaaattcagaaggaagagaggaagggagagaaggagaaagggagggaagaaagagaaggagagagggaagaaaaacttagaaactatccttaaatgtatactagaagttttgaaccctaaccttgagtgagttttgaaaggtttctattggtgtcgtagctccatacctcttcattccagactagtagttctcaaattgtttcagggagtttttagtcttcttggagccactgagaatgatgggtggaggggaaagggagatgctgtacaggatctctcacagctctgctttgaactgctcaaaatattggaattccatataagattgttttaggagatgtcccattgctatagttaaaacagtttgaaaaccaagattttaaaggaaattgcatgcccaagacaggctattgacatgtatggacagaagtccctacttttctgtccaattatgacttatcatagaacactttctcatcagagtctacttttgaaatacaaataaatgcatacagatgtaggaatctatgaatcaaggccagtgggtctttagccattgcctcgtaaggctcctgatatttgctgaattggggaggaagtggaaagctcattcctggatctggctctgtggcttgcccattactgggacttacctcttcccctcatctgttctttctgttttctcaaatgcctccaatttcatcatggaaatgctcagcttctatcagatagaacaaattctcccaagaggatggagtccagcctctatgtcgggttctaccttgcatttgatgtgcagactttgggcacacagagtcaactactgtttatgtttcaatgtgctgattgtcaagagtgaagagattctgagactttttttaacattaagtttgagttgtccttgaaaacaatgcccaatttgtcagatttctattctgtgccagttttcatccagtttaatgcgtgaactctatggattttacaaatgacgtcttctggatcatgttatctgtttacactgatcttaagtgtatgtaaaggttatttgactagatgtgtcttttgggttttttgtttctgtttttttttttttttttttttccagcagagaataaatggtcatctcaacatttgtttggtaaaagaagcaaattggtatgaaattgtatatttatgcatgttttttttccctttctgatatctctgcctcttcctctctctattattaaaggaagaaatacccctggaaagccaatgagagaggttagtgagattcaggctcacggccatggcttctgtctgtctcatcctgctttttatgtttggcgtttgtgtaagaattgtgtgtgtgcacgcgcatgtgtgtattacacattgtgtcatcatgtaaggatggtagtcacctctccacttgcagctcatgaggaacattcctcaaatgttcattgccgttgtcatcaccatgacgacaagactggggttgggagcaagaatctctttaaaatggcaatcctttgtagtccctaggttggaatcctgccgttcatcatctgttgccatttgcaacactaacaaaatcttcaaaataaatttagccttgaacataactgatgagtcataaagctttcttccacttccaggaccttagcattttctgccagcgcccttagtttttattcttctgggatgacttcattttgcttttgtttccttttttcttggttcctacgctctttctctcccattttagcgaacattttttgagcacttactgtgtgccaagcattgttctcagcacttgccatctttttcatcatgtcatcttcatgacaaacctgtgaggtaggtactcttattaaccccgttttacagataaggagactgagtcaatgagagagtaagcagtgtgtcccaggtgacagagccaaggatttggatccaggcagtctggctccagacccacactcttaactctcatttgaaaggcttacatcatctcaacgtacccttcagaagatgatcttttttatttggtatttgaagccacacagaacaataaccaattcgattaaaaaattaaatattggagttttgagaggtttttaaaatgcctatttatgggttgaaagggatagggtgcagtcttatcactgaatgtggtttcaggttttacggtgaaagatgcttcttactcctattccaccaggaatattgtctgaatatcgaattacctaattaagtgactgttggatgacaaagtgttaactgacagcccaagtaaaatcaaggttgtctttaccaagaatttaatctgaaggaggagagaaggaaagctctcccatgggatgacagtgttctgggagacaggctggatgggtggagagtccttcttaaatgagaagattctggattccttagcaacaggatggactggagagaccactgattcatttaaacacaggagtcgtaatgaaaactctgccaacatcatgccatacaagtctaatcaatttaatgattcttcagtgtgtctgtgccagtgcctccttccaaggctttgggcagtggggccagggagggaatggtaggctgggaggagaaattgaggaaacctgacttggtgaagcattgaatgcccctgacggtttgcctggttcatgtacttcgtatgtgagacttcttgggttcattcttatggtaagtgccccttaaaatttattcattttaactttttgtagaaaaatgcaccataattttgaccaccttaaacatgtttcactcacaaatgaatttcagaaaaggctagcacatgtaattgaagttatataggcatttgcagacttgactacctgaggtgtatggtgttcagacaagtttccagaagccaaagaatcaaaacaataatgaccttttttaatgctatgaaaatatcccaaatgtacgtaaagcagatttttttcagagattaaattatagagaagaaaagataagcaaatttccctgtagtattccggctttcctttggacaactgaatgctaacaatttatttgggaattgtatttttaaaaaatagagcaccagattgctattgaggtcttggatctttgccagaaagtctcaattccaatcgctgtggaaaacaattccctcaggcagtggtgacgtgtgagactaaatgtgttgcagttagcgccaacttgaaaaacatacaactgccctaatgttcaaggcatagtgcctttgtgttcaataatccttaagaatggattaaatcaatactttctatagacatagttttctgtcaccttgtgcctgaaggtgattgcaaatgcctgaatcctggctgcttttcagtacctctcatacttcatagtatgagattgtaattttgactttagaaaaatctgtcaggtaacattaatgacctcccgaatgctctgccttacacacatggataatagaactaggatacaaatctactttctatagtcatgtcacagtgcagtcttacccctccaacggattaaagtatgattctttagggcagtagtttgtaaaaagagattgacttcttttttctggatctaatgaaaaactccatggaaagaaattagaattatttattctggtaaagcaggtatttagtgaagtaaccaaaggcataatatagatgatgaggtgactctaaaagttctttatttttatagcacaaagatggccacaaggtcatttgtgaaaatgcagcagtgtaaaccggttaaaggccacccaactttttgtcggagtgtgcatggcacattaagaataatgaacctgttttccctggcaaatctttaaatagcagatacccctagaacttatgcttcttgagagactcaagaattttccttccagttagtaactgaacaccatttcaaggaagagaagcaccacttggctatataatccataaatgcatttatttgttttattatattttgaactgccatctacatcccctagcacacagcctaaaaagaaagacactttgtgattatcgataagctgacaggaaaaaaaatgagttttctccccttttcgttgatgttttgtaatatgttttctagctactaggtggactacatactatagtcacatgtgggccatgagaaatacttcgaattacattcaggcaccatgttgtaaaggtcctggactttgtttttactgattttgttaaccgtaaagatcgctagtaattaaaaattggcagttagtccatctatcttcaatttatgcatgaataattatgcagatttcccagggttgctggacagccaaaaatagatacaggggaagccctccaacttgatagcagcagttatatatttgtactctgagctctaaggagcagcaaaggccccactgtgtcgtcttcctgtggtttttatggcacagaaagccaaaaatgatttcagttcttcactgagggctgccaaactattggcccactttatgaatagttgcatatgctttgttaaaaaatttttatacttgcagtctcagccaaaatccaaagtgattttctaaaatataattaatactccatgaaattctttgcactaataaagcacaaaaagatagatatacaaacttggtcaccttaatagaaatgcctgaatgacattaaacttttaataagtaagtcttcagttgatctggtgccatcactgtttaagtgcctgcccgtgaatccgcttcattttgtagagaagctatatctcttgaaataaatattaaaacaaaatactctccctagtctatagctttaatttttattgggatatctttaatttttattggtatttttaacaattattatgggaatctgtaaagttgatacatggcaaggtagtaatagcctagtaaagcatttcagttccaaagacaatacttgaatagtggaaggatttaccaatgtgcaataattaaaattagccatgtaaaactatgggacatagacgaaaaggcaagccataaagtaagtctcagattatcttactctaaatctgaattttgctacgaagtacccagggacattgtgctgttctttttctccgtgctgggagattcgtgctaggtcgtgctgcattattagtaaaaggctattgtgatagttaaccctcatttaggaggagctctaagatggattcacaaaatacccaaatgcatacaatacatgtgggtcaccttataattagggtctagagtaatttggaatgtaaagcaatttttattctgaggtttcctaattcaaatgttaatagtgcaccaaaaggtcaattcaagagtttattattattatttttcaacccaagtaaaagcagagagaaaatagccacctccaccatagcctcagaagcaagccaacagcctgaaacagctttgaaatgaaaagttggtgtggcggtgatggtggcagtgataatggtgacgatggttgggtgctggtgatggtagtggtagttgtgaaggtggtgatggtggtttgattgatagtaaaaaaaatgttcgttaatacaagtagagagtaagtaatcaatcaatcactcatagccaaggtggaaaagatgtatcccatcatggaatattcctgttctgatagaaatcttgtgcttatctatggaattcttttgatatatatttacattgggaacctgaatgtagcttgacatttttccatgtaaacaccagtagcctgatccaacattaagctgatactaacaaacaacgtgtaatggcttcattaataaggctttgcttcttcctggaaactggtgaaaaatcaaaccttgttgtgtacaccctcgatgcagcttctgtgttgtcttcacccagaaatggggaatgatttcccaaatggcaaagaaacagagtgatgctatctatctgcaccttttgtaaagtctgtctttctttctctttgttttccaggacacaatgtaggaagtcttttccacatggcagatgatttgggcagagcgatggagtccttagtatcagtcatgacagatgaagaaggagcagaataaatgttttacaactcctgattcccgcatggtttttataatattcatacaacaaagaggattagacagtaagagtttacaagaaataaatctatatttttgtgaagggtagtggtattatactgtagatttcagtagtttctaagtctgttattgttttgttaacaatggcaggttttacacgtctatgcaattgtacaaaaaagttataagaaaactacatgtaaaatcttgatagctaaataacttgccatttctttatatggaacgcattttgggttgtttaaaaatttataacagttataaagaaagattgtaaactaaagtgtgctttataaaaaaaagttgtttataaaaacccctaaaaacaaaacaaacacacacacacacacatacacacacacacacaaaactttgaggcagcgcattgttttgcatccttttggcgtgatatccatatgaaattcatggctttttctttttttgcatattaaagataagacttcctctaccaccacaccaaatgactactacacactgctcatttgagaactgtcagctgagtggggcaggcttgagttttcatttcatatatctatatgtctataagtatataaatactatagttatatagataaagagatacgaatttctatagactgactttttccattttttaaatgttcatgtcacatcctaatagaaagaaattacttctagtcagtcatccaggcttacctgcttggtctagaatggatttttcccggagccggaagccaggaggaaactacaccacactaaaacattgtctacagctccagatgtttctcattttaaacaactttccactgacaacgaaagtaaagtaaagtattggatttttttaaagggaacatgtgaatgaatacacaggacttattatatcagagtgagtaatcggttggttggttgattgattgattgattgatacattcagcttcctgctgctagcaatgccacgatttagatttaatgatgcttcagtggaaatcaatcagaaggtattctgaccttgtgaacatcagaaggtattttttaactcccaagcagtagcaggacgatgatagggctggagggctatggattcccagcccatccctgtgaaggagtaggccactctttaagtgaaggattggatgattgttcataatacataaagttctctgtaattacaactaaattattatgccctcttctcacagtcaaaaggaactgggtggtttggtttttgttgcttttttagatttattgtcccatgtgggatgagtttttaaatgccacaagacataatttaaaataaataaactttgggaaaaggtgtaaaacagtagccccatcacatttgtgatactgacaggtatcaacccagaagcccatgaactgtgtttccatcctttgcatttctctgcgagtagttccacacaggtttgtaagtaagtaagaaagaaggcaaattgattcaaatgttacaaaaaaacccttcttggtggattagacaggttaaatatataaacaaacaaacaaaaattgctcaaaaaagaggagaaaagctcaagaggaaaagctaaggactggtaggaaaaagctttactctttcatgccattttatttctttttgatttttaaatcattcattcaatagataccaccgtgtgacctataattttgcaaatctgttacctctgacatcaagtgtaattagcttttggagagtgggctgacatcaagtgtaattagcttttggagagtgggttttgtccattattaataattaattaattaacatcaaacacggcttctcatgctatttctacctcactttggttttggggtgttcctgataattgtgcacacctgagttcacagcttcaccacttgtccattgcgttattttctttttcctttataattctttctttttccttcataattttcaaaagaaaacccaaagctctaaggtaacaaattaccaaattacatgaagatttggtttttgtcttgcatttttttcctttatgtgacgctggaccttttctttacccaaggatttttaaaactcagatttaaaacaaggggttactttacatcctactaagaagtttaagtaagtaagtttcattctaaaatcagaggtaaatagagtgcataaataattttgttttaatctttttgtttttcttttagacacattagctctggagtgagtctgtcataatatttgaacaaaaattgagagctttattgctgcattttaagcataattaatttggacattatttcgtgttgtgttctttataaccaccaagtattaaactgtaaatcataatgtaactgaagcataaacatcacatggcatgttttgtcattgttttcaggtactgagttcttacttgagtatcataatatattgtgttttaacaccaacactgtaacatttacgaattatttttttaaacttcagttttactgcattttcacaacatatcagacttcaccaaatatatgccttactattgtattatagtactgctttactgtgtatctcaataaagcacgcagttatgttacaaaaaagta

SEQ ID NO: 206 - DNA, 244360 bp, Homo sapiens
gtgagtaagcccacggcacagctaagtgcagccgcccgcctctgtcactgggagacagtccacttaaatgcagctccagggttgcgaggcacccaccagcatcattccccatgcgaggtggcaaatgcaacatgctctccagtttggggtgtctacttctctgtggaagtattacactagccctgggaaatgcacagaaattgccaaaaggcaagtagcctgatgttttatgttttaaaaataatattaagatatagatgtttttaaatgttgattttaaatatgatctgctttaccatacggggggaatagagttattctgcagagattcaaagttcaaatgtgtgaaggggtctcttaaacttttactttcccctcctgttatttacttttcaattacagctctttattgcaaaaatgaaaacaaacttattacattgagcagctgttcatcagagcttgaactgtatactttctaactatagtgcttgtgtattgaatcatattgtgtaaatggatattatagtctgttagaaagagttgtttggtgtttttatcctcctccccagagactgaatcagtactagcttaagattcaaaagaagctggttctgaaaccttgaatctttggtgtgaacctcaaacatacctgttgaccaggaagctgagggagtctaggcaggtcagaccaaagtacggtcatgtgctgatttgcagacacgtccctccagtggagtttggaagagggcttgagctgttggacaggacactcccccctttcttggctaaattgctctcattttagtgttggtattttgtttacaaatgttatcagaagaaaattaaaatttctaaattttgaccctaaaaacaaccctttgagcccatcagaaaccaaaacaagaggctgttgcctctctcctgtctctgaacataaatgttgcatgtacttttgtttctctgcagaggcacttctctaagccaactctaggtctgtgaaggctttttatggttgcagactgctgtagtcagcaggattgtgaaaaacaggctggaatttaccatacagtcatgatggaaaacatcagaagtaatgcagagctgcaggcttgtcaagaacctggtgtgcctaaagtcagaaagaaaggttgctagtgtcagaatatccaaaagatcatccctaggtcctctctctgggtagtctgccccaggatcatcttgtcccaagtgaaaactgttctttcctcggtgggtaaagtgaaacttgaatccagcatgtgaaggctgaagcggttggctagttgatatttcacacgataatgtgaacagcaataaaaaagactaagtaaactttctcaactctgatcaaataattaaagaaaaataaaaaacaagcactcttagatctttttctaccaagagttttgctccttgatcacaataaaactgtgatttaaataaatcaattatgagccacaagcattcagagttaattgtacctactaatggaatatttaacagtaacatatcatttgagaagagtctgggggttttctcagtcttaatacctacagaagacttttattttactttttattcattgcatagggatgatataggtgcaactttgttactgcaaacttctggacaatcccagtgctttaattatcgtgttgcaatcactagacacaaatctcttgacacaatttttctttatttataatgggaaagaaaaaaaaacatagttgtcgaaaatggccacaaaacttttgttgtttatttaaaaaatatttgtagttttggtaatttggaaaaaaacatcaaattataataatgataaaagaaatggcaagtcttgtttttaatattatgttttttctttattggaaagctattgaggaccttttagctgaagtcatctttttcaaactgtgctccaggcataggtgcactgtttgtcctacaatgggtagagtttggggtgagggtggaagggcagctgattcctgtcaataacttgtggagtctttaaggggggaatcacaataagtgttagcagtttgcacattctcaataaagaaacctgtacaactttttgtttctcacactcatttgactaagaatcctcttttccatagaagatctataatatcttaacaggggtttgtctgtcacaggacacatttggggaaatgttgagttaaaaaagaagaaaaaagagtaaaagtttttacttttgttcttccttctactttagagttggttaaatactatttgtgacttaagaagtggttagaattctggagctagaaaagatattcatgatcacttagtctagtgattcccagacctttggatttatggaccaacaaaaatacacaaatattttaacatcagggtcctgttatagagagcatacttgaattttgctatgtgaggatgctcaaagggaacaggggagaatgtctagtgttcataaaagtaaacaattttaacagatttatacaataaataaatttaatttcataaataagtccattgttatttttctcattttcccacagactaatgaaaaattgatcacaggccaatatttggaaaccactgacctaacataaccatttattttacaaatgaagataccccaaagcagggcagattcagtaactttcccatgttaatggtggagccaggacttgatacctagcttctcattcaaaatccatgttctaacctgcctcctgccagataggcaggttcctctgaccccagccttaggaatgacattctgtagtgtacatgtgaatgctacctattccttgaataaaagagtttcttgtaaatttctttaacagtattttaattttaacttttcttcctaagaacatatctacatttttatgtacatattttatatatatattatatatacaaaattatatatatataaccatatatagttatttataagaagtcagttgttatatgtggtgtgcctatttgcatacctagtcacatactttgttataaaaagtaagttattagaagatttttgcttagtttttaaaagcttggagactattaatggagcttttctcctccccaccactaaatgactatagttttgtcaaattatttatttttgttagcctcagttttctcattggtaaaatgggactaatgataactatctcatagtattttaggattaaatgagataagagacacaagtctggcacataacagattttcaataaatccttattgggtcatagaaaaggggatcaatgttgaaaaacatgcacaccgaataacacatgatcttgtattcaaaatgtaagacaaatctcttgtaaggtaggagatgaggtggtgtgaacttggcagaaagatggggtaaaggactgcagtgttgttctacgtggcaacaagggaggcttctaccgcattctagcctgaccattgtctgcccatatggccaacattaccctgtggaaagctgcacctttgctctaagatcagcttttccacagggatttgtaagatgtcatagactcttcaggtgagctcctgttaagcttgtttctcaggaggtgaattagaccatactagagaagaattttcacattgttttatacctttggaagcccctgtgctccagctacctctcagaatctttattcttggcaccattggccttttttcttttcctggcaaacaggctaaaataaaaaccagtgagaacaatatgtaatgaaaggagccaacaaaatcttatagtgggagagcaggcccttgacacacctctgcatggaaactccagtatacagaagattgtaattagcccaaaggcaatggctattatttttaagcaagtgtgagaaaaaccacagaggaacctccaagatacaagtgtaatctgatggccagagggcatgaggatcttgggtgtgactcttgggatatggcagagggaagaggcagctggctctttgctttgggttcttacctaacagagtagaaatctctgactttaggaacaaaacacagagcagatgataatcataacagtaactgccatagctattaataactattaccattattattatcacaggtaacattctttgagtatatcctgcatgtggtaatttagtgcttcatattttaatgtggaaaacctaattaaattattgaagctcctccattgtctttgtctgtttcgtgcttctgtgacaaaatacctgagactaggtaatttgcaaagaacagaagtttatttttcacggttctggaagctgggaagtccatgatcaaagtgctggcatctggtgagggccttcttgctgcatcctcacatggtggaaggcagaaaggcaagaaaaggataaatttcctccataagactttttataagggcacccaatcccattcacagggaaggagtcctcatggcctaatcacctcttaaaggtctcagctcctaatactatcgcactggcaacacctgaattttggagggaacacattcagactatagtacctatgaagcaggtaaacctattattcccattttacagagcataaaattgtgcctcagagtgtttaagtaatttactccaagtaatatagctagaaagtggcaaatgactatacctttaattttgatgcaatattagttccctgctctatgtaaagatacattaattcattcaagtaacaaattatattggatgtatacacagagcactgaggctggggagacaaagcttggcacttgtcttcagggagctgaccagcttgtggagaagataagggactggtgtggaaagggataattacaatagagaggggtcatccttcagtgtgggtgaagcacaaagcattttgagaaaaaaaggatccaatctggatgggaggtatgaagaattatgagagaataagaaacccaaatagaggtcttgagtacaaacacaagttgagacaaggagaaggattgctgagaggtgaggggctttctcaacaaaggtagctgctggcccagagcccaggcaaccccaggggccaaagctcagtgagtgttaaagtactgagagggaagcctagactgaaaaaaaccatacaagatgtaactgtgctctccttgtctctatctggcctgactcctcatgattgattacaaagaggaaataaaatgttgtctttggagaggaaggctcttacaccttgctctgtcaactttccagctgctcacctggcagctggctctccatggagcccttccaacctcactttgacaaaacaagaatgtgtcactccaacagctcagtccacttctccaagaggtggttgatgcttatgggaggctgcagaggatctcgtccatcttaagttatggaacacaggatactggtgaggagtgcaaagcctacttggtgtggttctgcttttatttgagtaacatatatttatgtattgctgggactgtattaaacagtacgttagaaaaaaatggttctgctgctaaaaagaagcttaaaaaccaccaagcaagaaattattttagcatcttttacagttctaaattttcttgacagttttattgatgtgtttgtctatcaattattaaagattatcagtagtccttaataattcttaaaagtatactaataatcatcatgttacatatcaatggtgtttaatgctgtgtttatgtaaattatctcattttatcctcacacctgtgaaatattattatctccatttcacagatgaagaactaagcttaaagagtatgttagctatctattgctgcataaaaattttccacaataatctttaattgactgttaataatccttaataatcaatagtcaacacatcaagcccagattattaagcatctactaggtaaactgaatgagatacagcccctgctataaaagaaccttatattacaaaggtaaaaactgaccaaatataatttgtcctgatgctaaatttagaacctgaggtttaaaaaaataaagttttcttgtgttaattatacattcactagtttagttttatagactgctatattgggctataagatactgttaagaatttttactatcttcccctgtctcccttcaagaaagagaggggacacaggggaacacctgaaaatagaagaattcatcaatataatattatagcaaagacagttaaaatgttataggctaatgtgagtttacagaaggctttttaaagacataagtgaggtgtttaatgaagggaatgccattcaggagatgggaccaatcactctatctggatcaccaccctcagaaaaaatttgccttttgctgttccctgattgcaatttataacagtaggtataaacaagacaatattgaaagtaaataggtgaatttaataaaattgatctcagaataaacataaaattaagaaataggatactctaatgtgattatctagattatctagttatctagagagattactagtcaaataagaatacatttgttaaaatgaccaccaaaaagtaaaaataaatagtatcagctaaagaaggaacatgctaaacataatatagaaaaacaataattgatatacatatattcaattaaaataacattttaaaagatgataaccatattactgtgtatcaggcatgatatttaatgctaagtgtttataaacatgtgaaatatatattattattagctccatttcacagataagaaattaagtttaaagagtatattagtgtaatcccagcactttggaaggccgaggtgagcagattacttgaggtcaagagttcaagaccagcctagtcaacacggtgaaaccccatctccactaaaaatacaaaaattagccaggtgtaatgacaggtacctgtaatcccagctactcagaaggttaaggcatgagaattacttgagcccaggaggcggaggttgcagtgagctgagattgtgccactgcactccaacatgtgcaacagagcaagactccatttcaaaaaaaaaagagtatgttagttatctttttcttataacaaatgtccacaaaattatcaacacacatttattatttcacagttgctgtgagttaggagtctgagcctggtttagctgggcagactctcctctccttcaagatgtctcacaaggcaacagtgaaggtactggccagaggtgaggtctgatctgaaggtttgcatgaagaaggatttacttccaagctcacatggttgttagcagaattcaattccttgaggatcattggtcaaagggcctcattttctcactggctattggcctgaggttgctgcaggtctctgcctcataggcctttctattatggccacttgcttcatcaaaatgtacaagcccaggagagtctgctggtaagatggaggtcacaaccttatgtagctgaatcacagaagtgacaacccatcacttctgccatattctactggttagaagcaactcacaggtttaccatacaagttgattgtatacctcagattatgtaagagtctatccaccacaaagagctcaatggctggtagcaagtgatatagtgaaactatgaatatgggaaatctaactccagataatatactggtttaagcattaaaactccgtcaacttcctaaagaattaagcattttgtggcagatgccaacattggcaaactgctaatttgtctccctcagtgcttgaggttaattataagaaatctctgagaattgagataaatatcttaagagtaccaagtaaatattcagcacccaatatggaccttgttttctgtatacaggatcccagtcaatgcctagattcctttgctggtttcctctgtggtccatcaaatgtggttgataccatgtacagaggcacacaaaattcctccaaaatagaaaaaacgcttttatccctgacaccatctcttaaaggaaacgacaaaaacataagaaaaaaattaacatagtaggtaatgaacacctatgaacctgatgatacagtcctgataaaaatgtgcttttctggccaggcatggtggctcatgcctgtaatcccagcactttgggaggccaaggcgggcggatcacgaggtcaggggatcgagaccatcctggctaacatggtgaaaccctgtctctactaaaaatacaaaaaattagccgggcatggtggcacgtgcccatagtcacagctactcgggaggctgaggcaggagaatcgcttgaacccgggaggcagaggtgacagtgagctgagatcgcagcactgcactccagcctgggcgacagagcaagactctgtctccaaaaaaaaaaaaaaaaaaaaaaaaagtgcttttctgaaacttcagtggagttgcttttagagtaaatggaagttactgtaggtctaattaaacttgtgtgtagagaaagaaaatatacttttatcagtggatgtgatggaagcaactagaaaaaccagaggagtttctctcagatcctatttagtgttaataaaacaatttttccatatgctctcaggaaagaaaatttaggttgtacacagaaaatattctaaccatgacactcagactctcatagactgtttaatactagataccctgtgggtctcttctctagtgtacagtcttctcttgtgttgggaaggccccgaaagtgcaggaggcacatggtaggaaaggctggcttcaaggttctcagactactttggcaaagttctgtggacagcaagactaaatcagtacttattctactccgtataatattagcttgggtttcccaccaagagccttccacagcaagattgttatagtgtgttgtaggtttccctcacctactaaagccttgacatatatttacagtgattttgatgaacatttaaggcctgtcagtacacatgctatgaaatcagctaatgttcctttctgtggaattctaaagaaggagctagaagatgtggcattttcatagaagatttgtcatcattctccagtcaaggatcatactttgaaagcccaaccattagaaaaccagggcaaattcacccacttcaagcatcttctggtcacactagaaattaattttagagaaaattgaggcctaagtcacatctcacctatgacatagcaattcaatattttcttcatttaataagtttacctatgactataaatactataatgtatatcccaatacaggctatagcccaatatatttaatcctggatgcacatgagaatagtaaagttttcaaaaatatcagtaatgctctgcctccccaacaaatttattttaaattggtctagggtgggatttttttttttttaactcctcaggtgattctaatatggccagggttaagaactactgatttggagctttttgacaatttgtatgtataagtgcttgataaataaatctttcttgatgagtacagagtaaaatttaaaggttgcaagtacgtttttctactatttaagttttgatttctgtaaatttaaaagtgatttttacttttatgctgctttgctccaggattttaaaacattgtttgaaaaaattttcagactccctcctgaagctatataaaataagtaaatgtgtaaaattgagatgagcatttggttttagtgttagaacataagtgctactctcagaagccagatctgaggagctgtgactgtgatttttaagaatggacttacatttattcattttgtcatttaattaatattttttaatcatcgtattaggattacaaagatgaataagacatttcctgcatttaaggggtttgaaatcagttctatttaaaaatacttggccacgcaaaagtcatttacttttatatgaaactgttggtgtgttaattctttatcctcatttaacaaccaacatttgcaggagctaagctatcccactgtgttgccatgtactggctttaagtgatatacataagaagaagaaaaatgaattcaaatgtaatctgttaagaaaaacaaagcacctcatgatttcagtgcaaaatataggagttaagtaaatatgcaatggatttccatactcagaaagtacgggttatataaattatactgaaaataatttctttaattgtgcacatttatatattccagctgatttttgtattttatgttaaggataatttttcagcatgtagcatgtcttataatctgaaacatatttaaaatgtattccactgtttctctaatgtaatggaagttctctcttctctgagtagtggtgaatgaaaccttgctaagactctgaacaggggcgctttgcttacaaggtgatgccaaggtggagcttcagatatcctttctcgttaaatacaattctgttatttttccattctgttagctgataagaaaacattctggttttccaagggtcctcctgagaggccactgtgcacgtgtgtgtgggcatgtgagacctaacaggccttgcttctctgagagcagcggattctggtgttcaaggaggggcttggagtgtctgccaaagtcatgctggcagcgagctctggaattcagttcttttccagctatgtcggcaggagatgcaggacaatttccttctcctttcactttcccagatgaagttaagacactctggccagttagtttagagtaaggtatcagatgacctggaagacagtccctccattcctctccaggcccatcctctccaaactcccctaatgatcctgctgtcacagaattcttccctaactattcctttttacaagaattaaaaggaaaatgattctgggcatgctctcccatatcaggtttacctaatttgtagttttgttatgagctggaaagataaatactgaaaattagcaccatgggttagtgggtaaagtgcaggagtccacgtgagcccgagtaagtcattaggttggtgcaaaagtaactgtggtttttgccattaaaaaccacaattacttttgcaccaacctaatgcttcacctttctgaacattagggtttttttctctaacaaaaggaaataataaaagtatcagtcctctttagctttcattaacaagtaatattcgggtggcattaatggatttttttgatagtaactttcttaaccaaagtaaacaaacgtgaagaccaggtacatttttaaaactctttacctgccaatatagtttggctctgtgttcccacccaaatcttgtctcgaattgtaatccccataatccccacacgtggagggtggaacttggtgggaggtgattggatcatgggggtggtttctcccacgctgttctcgtgatagtgagttctcaggagagatgatggttttataaatggtagtttttcctgcactctcacacattctctctcttgcctgctgccatgtaagttgtgcctgcttccccttctgccataattctaagtttcctgaggcctccccagccatgcagaagtgtgagtcaattaaacctctttcctttataaactacccaatcttgggtatttctttatagtagtgtgaaaatggactaatacatctgccttggcagtgatggaaagatctagatactccagtagcctggacactggtgctgagcagaaagacaccctttctgggtgtcaaagtctagagtgtctgagcctgtggtgtggcatccacacagtgaaacaggatcggcagagaggagccaggacactgggagtgttttcaacataattcttgccatgagcatcccactcctgtactctcatccagctctccctgaaggagtctggaagatcctgctcagagcatatttgtcttttacggtgaaacatctgaaagtacaagttgtggtctttggtcatttttttctccgcctatccttgggatgcaattccatgtgacttagcctgctcctggatgcctgctgcagtctgtctggtcagtctgcaggtactggattggtttgattgtgtgactctttttctgcactccctctttttgttcccaatcattctctttcctaaactttcatcctccttctcctgcccctcctctttctcccttctctcaacatgatgagagtcttcagagcattctcctggcttccacccccagccactcctgctgaccactttggcccatgtccttgcctcacagctgactcctcatctgtttggatgcagcaggaattatcctttggaagacaatgcacactttatttttttttttaaggcaaaagtgttgtttctatgtcatgcaaagtattccacttggttgaagaatatcattgcttcctgttcatttatcttggcatgaccaatcttagaaaagcacacatttatattcatttgatcagctctgtgtatatcagattagacaaaccataactgtatattcacaccatagcattcctagatggctttggctataacataaatcactatgtccctcgaagggtggcaacaacatatgcacaatagcagtcagacattatagtgttcttttgtaaagctggttttcaatttattctggatgtttgttctattgtagttggagtttgatattttgaagaacttgcagagaattctgctgttttccagtggatctttgagttggatcttgagttcaaatgtcatatttctcttcatttgtcttgtaaccaatatttccatggaactgagtttctgtgtaaagtgtgcccaagaaatggtgatcctgtaattggtgactagatcacagttgcaggcatttaatactatttcaacatataaacctctttctttgatctccatttctctggctggctgtcttctttgctatactcaatagatgacttccaaattttcctctcactctttgtttacaaccctcttctttcccacttgcgtgtcttctcaggttctaattcttgtgcttggaagaccctcatcatctctgctatggtaactttatatgttctgttggcttttagacttttataacccatattaatagtgaatactggaaaaaaatgtgtatttcagtgagctttccaaatccaggtgtgtatgtgtttgcactgtgcatgccatgttggattgttgtgctggttcatcttgtgatacaaataaaaaccaagggaggctgaggcgggagaatggcgtgaaccggggaggcagaccttgcagtgagcagagatcatgccctacactccagcctgggtgacagagcaagactccatctcaaaaaaaagaaaaaagaaatagatgaaagtcctacaaactgactaaatttggtgtgacacacaatgaatttttgaatgatcaacatattggcagtagtatggtttagggttttgctctaatgtataataacctacttgcaaaattctttatagacagtctttcagcaaaacaagtgattttgaacattatcccattttgtgaacaactcaaattttaaatattgatattacaactgagttaccagaatgactaataagaaataccattggattacttagagaattaacaatacttcatagtacaggttagtcaaaattccttctccacatgttcttggcaataaatcccatttcacaaattttcaaaaacatatcagtgccttttcaaatattctcaggtgcctttctcagatgtttacaaggaatgtgcattgagtcctataatcccataaatttgtgagctgaattgcgttatataatacttgttctttattggccattcagtgcaaacatctattttcacttatgccggaaaattaagacaacaagtatttactgtggtgttttccaaagtcatcataacccctggctcagatgtcatctgtaaggtttccgtggtgtcccagaaaagtccatttcaaacattccttttcatggttggaggttgataggccacaaagggaccacagatgttaacactaaataaatttcctgtgaattatcagataatttaaaaggcattaaaggataagcattaacagagtaaagatccttttagggatatctctttctagggactttattattttgtgagagtaatcttcttttaaaaaaaatggcaagaaacatttacctctgtttgtcagctctgaatctaaagtctctcacctaccctttttcatttatgaacttgcatcctacatctacaaggcctggttgtggaagataattagatggatatgaaagaaattttatgacttgactttgttttattgaaacatggctatttaacaaacctagagataatgactctcactctcagtatatggagaagcaaagaatcactgagcgcagtggtcctctagcttagcaagcatcatcatctcttagagggctggataaactcagaacactgggctccatccccagagtttctgactcagtagatctgaggtgggatggtttgaataatttgcgtttctcacaagttcccagatgatactagcaatgctggtcctgggatcacattttggaaaccactgacttagtgaatctgctaagtatgcagaatcctgcctcccctaacctcccccactttcactcctcccacccttactatactcacatcagattctgattcagttgttctggtaatctgcatgttaaacaactatcactgatgattctgatgagattaaccatgcattgagaaataatgctgatctctttacagaatcagtacaaagcactcgggtactactttgaagaaagtggataatataaacttagctaatttacttagttctagaaatttggagaatttgtgctttctgttgttgaatatatgataaatgtctgtagaaaaaaatttagctgatagagtgataccctctagttcttgagatgaacttgctggctgccttttataattagaaactattttttaccatagctagctggagccctgggcagcactcgcttgacataaccttgtttggtggtgagtaatgtctaaaacttcagttgaaaggtttttgtgacattatgagctattagtgggagtcattccacttgtgtatatgtattaaagttaatgcctaatattaaccagaggcatatgttaactgtaacccaaattcaagaaaactcacaataaagtatggacagtttactttactaggtcaatgaagaaagacacaattgtgacactaaagatgaatttgatacttcatgtgaatgttttctgtcattttgtcttacacagagtgctagccagcccttcagctagaattggacatcagcctattgttgagcattagctatgacacttgcacttggcagccagctgaaaacattgtgtgtgtagcttgcaggttagagcttcttttcttaagctcaggggagccataaaacccttgaagctgcatgtagactagtacacttgtgggtctgtgcattttcaggagtgttggtctttggatattgagcttcttgaagaagtctaagagctgataaaacttaagagctgtctagacagatgccttttaccaagcaagaattaggatgggtcaagtgaagggctggaagaattactaccatatgcatagatcatgcagagagggcctcgagatggtccatgaaaaatctcatactttgtaactaagatgtgaacacacagtttattttatgtaatttcttttgatgtggtataaaaaaatttaagtgtggtagtatccaaggtggccctcaattattctcacctgctgttattcatgctcttatatagtccccttgcacactgaatcaaggctgggctgtgtactcattaaatatggaaaaagtgaagtgaaaatatgtaactttcagaggctaaatcataaaggacattgcagtttacaccttgttcattttcttggatcacccaatctggagaaaaccagctgatgtgtcatgaaacactcacgcagatctatggagaggtccacaaggtgaagggcttagatttcgtgcctatatccagcacaaatttgctagccatcggagtgagccatctgggaagcacatcttccagccccagtcaagccttcaggtgatggtaatcctggccaatatcttaactgcaacctcatgagagattctgagccaggactgcccagttcagctcctcccaagtacctgatccacagaaactgtatggatgatgaatgcttattgttgattaagccactaagctttgggttaatttattatatagcaatagataactattaatgtagggagcatatgtgatgcctttttaattttaaaggactatttaaatggaataaaaatagaatgagaagtgtaaataatcttatctgttggcatatggctttggaaatgtagttttgcctatgggcaaaagaaaattggaaataaacacgggaagagaattttgggatcaattacctttccaggaccacaaaaaaactgagcataaatgctgattaaagagtgattggaaaaatacatgaataattatccctttaaaaaaattcatagaaaaatgtttggtagtttagagcagctaaaggaccacatctccagaggccttcatagttggccttgtctttcattccagagcccatctcaggactggccttaggccaagggtgtggatctgtattggtcctgctatcatttagaagagtcgacctgtgcccaagatagcttaaagacagccagatctgagatctgccccgtagctgacctacatccccgaattcccctgaggaacaaatgggcctcctgggacaaacttggatcaggccaagctttcatctccttggtcttagcttagaccccatcttgaaacttatgccatggcattctcatgtaattgtatctccagggtaggcattatgaaatttctcatctcttattaaaataccattttctatgcatctaacattatgagagaataaataaagaaagaagaaaaatggttaccatcctggtggaatttatatcctagcaagaggaatacacaaaccaaacaggatactacaatgtaataaatgctaaactgaggaaggaatacagctgaactgggctttattcctttccaaaaatagttttatttttcttaggagaattgggaaggctttgaacagggcgccttctctgccattctgcacaattttatggcatttccagaagtgttttatcaaaaaaagaaaaagctttatgtagggaatattttatatgcaccctctgtgaagggtgagaaaatttttctaaccccaaaccagaatacatgataaatatgaatatatttttgaagaagcaggcagcatatttataaatgagggctctctcacaacattaaagacattttaactctatattttacctatagtttacttcattaatggatgccattattgctttaagctgaacacatttgctcccttcaaaaatactattgtttataaaatgattatgaggaaaaatcacagaccgttatcaccagttgctaaggccttactaagaaagcatataacaaaacataaaaattgggtaagaagtttctatccagttggccagttcctcggccagtcaggatctgggttgcttggataatacaggtcacaggggacaaggagtcttctgattagtgcctcttcccagaccaaataccctctggattctgagggtttttttatatttcagggtggggtttttttatttactagtatgtatcatcattcagggaaccacaaggccccctgtggtctcttgctttcactcagattcaaggcaagttggacttgaccttctcagagcatcccatagttgccagggaaggattgttttggtggtgaaaacatgttattttctacccctcctttattcaccctcagtacacacacctaattaaacaagcaaaacattcaggcttttgaagctaatgctatttgtgaaggactgaaaaaaattgagtcaggtctaaaagcatcgtcccaacagggagggtgccactagaaatgtcacaactgtgactagagaccaactattgtataatccatttcccatcctgtccttggaaatggggagctccttcatccttagcagcccatctcccccaaggcagctagatcacagctggggctcccttctaaagtgactcacttgctcctaggactcccttactagaagcgcaggtatattgctttgaggttcaattttgttatcttgtttactaaagttgaatttcagtatgacaatacaaggaagcatcttctaatgattaaaagcttttatctacatccaagtgtaaacatttttgatttttgcaatatccttctcttttttctaagacaaagtaataataaaaattctcttgaaaaaaatccctatactattactaacatatggaattattaaataatcttcagattaatatattaaaataactaacctcttatcaaattaacttcttatcaaaataactaacttcttatcaaataactaagcttcttatcaagcttttttgccgagactgtctataaacaacttgcttgctgtctcttacagagagaacatctcaaacagcatcttgggcaggtttcactttctagaatgctcctgtcttgggatacctgttattccatgtcacattctaaagctaaccgtgacttattttgacattactttcagataattagtaaatattcttctgtagttatatcttaatctaggtaataagcaacaaaatacctttcaaaaatctttctaggtttaaacacaccataaaagttcccttctctagttcctttgtctatctaattgctatgttcaatccagtaaatttttataatttgtcaatgttaatcaagtaaagcatttccatctccctagaatgttccactgtgccttgtagtcaatcccttcccctacccccagtttctggcaaccactgatctgatttctctccctatagttttgcctttttcagaatattctatgaatagaagtatattaactttttttgtccgtttttttccacttagcacagttctttcataatatatccatgttgttgcatgtattaatagttagctccttttactggttgagtagaatttcattatatggccatgcagccacttgctcattcaccaattcaacagtagggttgtttctaatttggggccaatatgaataaaactgctataagcacttgcttacataggtctttgtgtgaacacacatttttatttctcttggataaatatctaggagtgagattgctttttgtcatatattaagtgtttgtttataagaaacatcaaactgtttttcctaagtggctacaacatttttttaatagcaaggtatgaagatttcaattgctccaaatccttgccagaacttgatattgttgatttttttattttgtgtttttatttttagctgctaataggaaagagtcaggtaagttttgagtccatatctctattcgttaggcatacttgttaggcatatttctttaaaaaaatgtatgatccattttcttagaaaccgcatcttgtctaaaaggtataatagtaggcaaattaatttgctgaaactcatactaatttcttatcagatgagataatatgtggaaatcggctacatttgcctggcacagagggaactttcaaaaaagtttagtcttgtctcctgttctgactatatcttgtattcatgagtcatcgtaagccaaacattaaaattctataacttaaattgaactgtcatatagtttttgccatttgaggcttcaagagtcaaattaagcctgctttaaacactttgaaagacagtgctctggggaagaaaatgctagctaaatctgagcatctcacgttatgcagaaattattgcccttatcttcattcataatgaaagtgttggtgaaagaaggaatgaagcagaaaaatgatcactggattggaaacaaaactcctctgttttagcccttactctgcttctaactggacaggtgaccttgggagaaaaaatttaacttccatgggtcttatttttctcattgaaaaaacccagagcttaatacagtcgattctcattatttgcagtagtaatgttttataaagttgctggaaacaccaaattagccaaaccgttgtttctatggggaaatatggagttggattcctgtgagccactggtcacaacattttcatcaatggatcagtacataactttgttttatgtgtgtttctgtttaaagatgccttacttaatacacgttgttgattcattaacattgaattcatggccaacagcagtagagctcattactgaatgaagcttatctaactcacatttttgctccataaggcacatcacagccttcttgtgctcagaaactccagacagcccttcagcaccacacttagggcctgcttaaacagtgaagtcactaacaaaaagcacaaaaatgggaaaggtgtggtgctatgtcaactgtgaaaaggacacttgtttacagtctgagagctgaaacaagaaggcagagcatcaccttgttcaacctcagccaggaacatgcacattgggtgactcagatttttctccattcctcacatgtccacaaataagtctgaaaatgctttgtgtattaattttgggattaaaaaccaatgttaattagtagaaacatttgcaaatgtggaatctgcaaaataatgaagcttggctgttatttgctacttctgttccgtaggataaatcatgcatgttgatgtgaaaggatgtggtgatgctgttattgctgttttagcatgggtgttttccccagccaggggctaagaaatccaaaacattcaggaaaaaaaaatgaatcaatctcagtacttaaatacttcactctctgtgcctcaaacaccataagcaaattagagaaactggagaacctaatggaaatgtttatttacttttaaaaatgtgcattaacttatgaagataacatcttgatgagagccttaagtggcaaaaataataactccattgtttctttacagtgggaaagggcttgttggaacctggttgttttagtgcacatttgcagatgcctgtaggaccgtttttaaactaagtggtcatccatcacttctcttgttggcccagagattaattttcacatcttaaaagtactttataaatatttgctagcactagtttatttgcagatccctttcagtacagaggggtttttcacataaaaatttgattttgctttttaatttaaaaagcactttcacacaattatctcactttaatttatatgatgtaagttttatttctaaaatataatgcagatgttgttttaatggcaatgctaactttatgataaaaaagagattctaaatacattgatgcatggagctagtgaggtgaaattaccaggtggcagatatgtgttcgtgagaatccagtgcttaagggaaggatgacattccatcccagctgcccttctccctgcccctttttaggaaggcacacccttctcagcccgcatttctgtgattcctccactgagaaactgcatgttgattggactggcaagaatcctcacacctcctttctgttttaatttccattttaaaatatatttttaatgaccttgttcctgatcctgatcttttaaaaagctgtggttttgctgggacaaagagcaaaacacatcttgatgagcagatgaatgaaatccaacttccatcagcatctattaaacacccaccacatataaagctctgtgcttaccagctgctttgatttcaattgtaggatataatcccatgtaaggcatttttgacagttaaggggaaaaattctagaacaagtggtgagcataaaagtggaagagtggaagcacgttttgtctttgggggccaccctgtgttctccatcctggacctggtgaccctaatatctaaagattcatcttgccccattccaaacttgccttctccttataatgctgtcagctccagactatcccatcaccatgcttggtcaaaatatccctagttagtgcctcattcctgctagcctactcttgaaaattatctgccatacttattctcttgaaacacttgctttttatttaccgatgcttatgtaaagtcctaattcaagagaatcaggcctgtcttctctaatgggaagatttcaaccaccaggtagcattataatggaagaatttcttaaatcatgagatcctttctatgtctcttaaaagtcttgtcaaataagtggtcacctcttctgtttaaatgtcaactgggtcctggaaaatgtaccaagcaatgtcttcactgcagaaattcctaactgaaatacaaatgtttgcctgacacttgcgaggcatgctgaggaatgctgtatatttagaggctgtatgtttaatccagaaaatggtatcagcagccaccaaaattccttgaaacagttataattaccaagaaagcagctttaagaactctttgtttgatgtacatcttggagtaactcagttttgattaggatttaaggaaaacaactcttggcatggagcatgtgacatgggccgctgtgaagaccactgcccaatcatttcatttggatactgagatgaagtaacagttactaacaggtggcagttcatggccctcccatgcttcttgggcacttgaaaatttccagaagccctcacttgtaaggagagggagaacaggtgctgcaaagacagaagaaaactttcagcacaagctgcagagctgctctcctggtggaactaccctgcgaggaggaaataacaagccaggaactcgtgctgccacttgaccgcctttcgtcctcctcctcaagcctgagggcccacaagtagaggagtgaggtctatccatgtgagagtctgggactctctagagcgatcaaaagcaagcaaattaataaaaattgcttgaattgttttatgtatttgagaggggcaagggtaagaccccaaatcccagtctgggtccatatgtctctatacgtcacattattctgcaactggatacctgtgagttgggcatcatgtactttgtcatattttttagtgtgttccctttggaaggaactgtagctacttccccaggtgtccaatggggtgctccatttttcacagaaacaaaagcaatatatttcaaagtcaaattgatgcttctgattttaccactgagcattgttatggagtacgaagcctaatttctgcttcaaatcaaaagccagtcgttcattcaacaaatacttattaattgctcattatagttcaagatctttaggagaatgcgtatggataagagtgccctttcttttttaacaatataacagagacccaaacaggccatctaggcctgtgactatagtagattttaggctgcagcaagaagttagaggaatgaccaaggttaggctagacctgtacctatgagagtagccccatgggaatattctattgaaagaaatgctgtaactcctatgtaacatgaaatttgtaaatgaaggccatttaataatgatttcctttgtagaatatgtgtagcttgttgattaagactaactttacatgagcaggaaaaaagtatataatgcattttcctctaaccttaaaaaaaaaagctttactctgctaagattattggggatttcctctggctcttggcaaatggtctacaaaaaaatgagttaacactcttagatgtggactcttcctactccaccctgactctattccagcaaaagtcattcttccttttcaaaaaaacatgattttttttcttgatgacgtagattggcttttccatctgtttagagctatgcctcgagatttaaagatagtgtagggtttttttctcctttcttttcaaatgcacacttttggaacaagatgctgttctgtatatagcatttattatttgtgattgatggagaatttttttcaagtttataataaaatccagagtcaaggatctgctgctggccacatttattgggcgagcccatccctttagtacttggctcttgctttttttgcatgaggcagcaggggatgcctgatgtggggccggattggtaggcaggagtccagggttctaattctggcaatgccactggctagctctagagccctacatatgtcatctaaccacacttggcctcagctttaaaatgaagagcttggtctataatctctaaactctcctctatctctaaaatttgggatgctgtactccatatgtaagatcactttgggaattgccttgtggcttactgcaggctgtatgtgtggaagtcctggctctgattcaagtctgtgactttcttgcttcatggtttgcatcacttagaccatgtctatgcttccccgccctttgtatcaaacactggatctgcgtaagatgaggcaatactgaccttattggtgaacagattactccttctacaggtttgaaaaagctcagcaaatcccaaagggcccaggcctgcaggagaaactgccattcaaagaataatctgtacttttttttaagacagcaaattatgagttgaacaatgagaacatatggacacaggaaggggaacatcacacactgaggcctgtcagtgggtggggggctaggggagggatagcattaggagaaatacttaatgcagatgacgggttgatgggtgcagcaaaccaccatagcacgtgtatacctatgtaacaaacccgcacgttctgcgcacatatcccagaacttaaagtacaataaataaaaagaaatgaaaaaaagtacactaaaaaatcaacaacataaaattttgttgtaaatagctgtcacttaagagagccccaaataatcttcaagttacttttcagtttaaaagatacagaccaagatacagaccaagatttcaacttgaccacacactatggattaaatgattacctttaattttgtgagatggtttttaagatctgagttttcactttcctatttgattacaccaaaatcacaattaaaataaaactaggtaacataggtggcaaaatactatgtatttcttgtatagctgtatacatttcttattatgcaagagaataataaagtgaaaaaagtgtacaaattggattatccctgttctctttccaagtgctttaaaagagatttttaatccatgaaattccttccttggcattttattccccttaggaaaaatatatatacatatttgaaatttctgaaatggatcattcaggatttgtttttcttaacaggattttgggattcaaagctgtatattatagtaatagaataaaaggctgaaagtaacttcaatcatatacagaatatggggcaggtatggccagattgttctattagaactccccaggctcgtccatggcagtcttgcctgtgtcctctaatatcacatagccccattttgatgtcagtttcaaccatctgatggttggccccctcctaatctcagtcatttcagtgaatttaaaaaggcagtgtggctactgacctaagtaactacagttgtttcacataggcatgcattgttttttcattttttttctttttctgtgccccttgtgagcaggaatgaatgtatatttttatgaagatgaggctgatctgaaaactattgtctatttgcagattaaaattgtaccttttataaaatgttcattggggcatttctattcctagactaatatagtaaaacttaaaggtcaagttagttgtaattattctaccttattgaattgtttttgaattgattgaaatcagaatattacaaagaggcatgagcaaatcaccataaaattggaataatttttattgcatattcacaagttaaattgttctttgtaatattggtgctccaaaaggttgagaggcccgacatgtctgaagcatcatcaatctctaataatatttctttttttttttttttttgagatggagtctcactctgtcacccaggctagagtgcagcggcgctacctcagctcactgcaacctcctccttccaggttcaagtgattcttctgcctcagcctcccgagtagctgggataacaggggcccaccatcccaagcctggctaatttttgtatttttgacagagacaatatttcaccatgttggcctggctggtcttgaactgctgaactcaagtgatccacccgcctcagcctcccaaactattacgattacaggtgtgagccaccgcacctagccctcaaataatatttgatttaacaaaattttaaggtagcaaaacttgagctgtcacttggaattgataggaatccaacaagatttacctttattagtcagaattcagagaccaaaaccccagagggtatacagttcaagcctttcccttcacagatgagaaaattgagatttaggaacattaagtcaattaaccatgattacactgctaatcaaaaacagacctgggtctgccaataagtctcccatatctgagtcatctttagtttgaaaaaaaaaaaagccttacaaattctagcgctttaaaatttattgcacacataacgtggtgaagttctttggtgtaggactctatgctcatcatgggggtgtggtacagagatgtagcatgtagtctcctagggacataatcatgaattcacagccatcaatcctgacatctcaaataatactttatgtctagaagaagaagaaggacattctcacattaatctgtttcatgtgtgatggatcaggggaggtattttgaatctttacatgttttaaattcctataatttaatctttgctgtaattcatatatttaatgaagtaagaaactatattttacaaaccaccttaacttctcatttgcaatacacccttgtgccgatggagaatctgcttacattttgttgctgtttcactattttactttcaagcaggggtcagcaaaatttttctgtaaaagactggatagtaaatacattaggctttgtgggccatatggtacgtgtcatactcaactctgctgtttttacaaaaacaggtggtggactggatttggcccatgggccatagtttgccttttgggtcatgaaattcagagatagcattgcctcacttccttcacttcaccagagaaaagttggcaaaagctaaggtgatggatgaaggtcttaccctgttagctagatgatcaaattagagaaactgggtttattgataacagagctcttgcctgtattcatagtccacacatgaagtcatggttttctattttcaacataacagctgtgcactatggaaacaattagtgttatgaatccaatgtgaccacttcaggttagagaacagagacattctcaggcttatgaagtcgatcgtgctttcatgtaggtctcctaggatcaaagtaggaggaaacctaagctagtcacagaactgggcctgattcatggactgtttggggcccatctttgcccttggttgaagtcctcccttaaagcattcatgcttttcacatctttctacaataatggaaagatcattattggatcaaatgtccaaataatggacattttatcctttgtaaaaatcatctaaaacatgaattgagcaggctgaggacaaggattttgttttatccccagctgtggcattttggcaaatcacgtcacaatctggcttctgctgacctcatctgttacgatccccaaggccaccaccaacacaccaccacacactaacacactaacacacacacacatctgttacaatccccaaggccaccattaacacaccatgattccattcttcagagcacccagattaatgcctggtacacggaagtttctcaataaatttattttaaattaatgatgtataaactcagtcctttccttactaaaaccccttctgatggttaattgaatacttcctctgtttttttttttttgttttattcagaataaaggctttccatgttttcacatcattgctgtaacaaatttaataggatgtactttggtttagcaataattggccattctggagggcatctgttaaaactatagagttgattttcttttatgaaccctgatatttaaataaactggaatgtttaatggtttgaatggcccagaattttgtcactatatccataaggtttctaaattttcttagtccttgaggcaaatgggacttgaaaaagatggcatttgagatgagttagggtcatggcccctcatgtggatttaccttagattcatgattctgctagatcagatgtccaaggtttgaactcttactgaaaagagttggcttatgtgtggaaggagagttgggtatggaaagggagcagcaaacgaccaataagaaggctccactccaaagttatctctgatcactgcacttatactattagaacttaaataatgcagtttgggtttccttattaatacaaaaatttatcatgacataagaaacttcttcattctttatgagtctttacactttaataggaactagctcttcagatattttccagtgtgatggctaaccaatcaaagctttaaagaagagaggctggtacaaccagtgagggcagaagccagaatttggggaaaatatgcagaaattagaaataggaggatgccaaaatttttgtctatagaattttaccccctaggaccaacttgtggaagtttgctaggatgctatttggttaattgagatttctgggctgttgggtgcctcttgtgggccaggacccatgcattagaaatactgaagtgaagaaaaatggacaattgtgccttcaggtagcttacattctagcgaggcaaaaagatgttaaacacataatagtgaagtggctacgttgtctggtgtctataccctggagttcgttgttgcatgccaggaaaatttaggacatgggacacacacaagtttaggagcagaggtttaataggcagaagagaagaaaaagaacaacagcgctctccatagagagagaggtctctgagcagaaaggaccggctggcggcggatgccccggaatttatagtccaatttgaggaagtggtgtctgatttatggagggctcacatattagtttgatcaggtatgacatttacatagtgcccaaagaaggctggtcccccaacccctaatcttattatgcaaatggactttccagttgattggtgccatcttgtctgctctttaccatacaagtggctgacaaagaaagggaagatggagccgccatcttgaacatgtctagaccctagttcctgctagcattcacccttgcaagatcccaccttgcaggctcctttttgctacaaaacgacttggggctgcttctcatcaaaaagaaaagtcttaccgaggactcccatacccttactatctgcctaagtgatttcttcttaactcctgtattaatagtatactaaatgaataatgtaaactaagatgaatgttctttgtaaaggagggctaaaaacagagaaaccatctctagcctgggatgtcagaggaggcttttataagaaaggaactcttgagtcaagtctgaaggatgagtgagtgttaactaactgaggactttcagggctggttagtgaatggcttcatgggagtgaaatcagagcctccctaggagagagaccagctctgagcagacaccctactgtggatggagcaggtaagtggatggaaataacagctggccagtgcgactggagcacagcaactaggcagagagggcttagagatgaacctggagagaaagagaaacaggggctaacatacattggagggtcaactacatcgaaattattagtcgccatctgggaacaatggaaactgttgaaatgtcctaagcgtgagctatatgttctgaattatattataaaaagacatctctggttaccagtgtagagtctatcgtagtagctgaagtaagagatggtggtggcttggactactaatgcttattagtggtaatttagtggtgataagtaaaaaaggaataaatttgtaagatattaagaaagtgaaaatatacagatttgacaatcagatatttgaggaggaaagaagaaagcatcaaaaatgactcctgggtttctagcctacacatacagtgagcattgaaaaaatgtagtcattgagaatgtgaatcataactttgcctttgttcaaatctcaaccctgccacttagtaatggtgtgatcttgggccgattgcttaaccactgtatgcctccatttctcatcttggaaatggaggtggagatgatactagtagccacatcatagctataatgaagattaaatgggttaacatatatgtacagtacttgacccagaataagtattaccactggttagttttcagcatcactacatgagtgatggttatttcctgtactagaaaagagtcagatgtagggccaaaaattatggcttcagtgttagacttagtgagtctgaggtgcctttgagacttcttagtgaacggtgctgagtaggctgtttcctataagagtctagaactcagggatgaggtctgcactagggctacaaattcaggagctgtcagtgtgtaagtgatagttcaagtcacgaaaatcaatgcaatcaccaaaaaatgtttcagaatgagccccaaggtcctccagtatataatgaccaggtagatgagtttgagcttatggagagacagaaaggaccagtcagagaagtgggagaatatttgaagaaggagggtgtgatcaaaagtgtcaaatgctaatctttaagtaaaatgaacagtatctagtgaatctagtgaagtcactgctgaccttacagagagtgttttgtttgtgtaattgacacagaagctatttcatagtggactgaagagagaaggaagtagaaggagagaagagggagcaagagctgaaagagaatgtaaggtcagatgaggacaatgttttgttactgttgttttttaagataagcgagatttgagtgtttaaattgtcaaagatgaggaccaagttgaaagaaattcatggaatagtgcaattttcctaaggaaaaaaggagaatgaataagatgtagagtatagacagagtaattagataaagggacagacaattcctgttatgcagaacaagaaaggagagggatgggtgctgacgtagacaggtttataggttcaaaagtggggatttgagggagtttctgtccagtgacttcaattttctgttgaagagagagtctgccaagtgaggagacagaagtcagaagaaagggctaaaacttgacaagttatgggagaagatgagaatgatttggcaagaggaatgaggacccacttgagattagtgaccatgaatttatacttataccatctaccctactatttgatgttctctagtagattttgccacttggagccaggtgccatgaaaggagattgttgggctcatccacagttgagatatctccagaaggatgtaacaggaaaaaagtaagctaagcgtttggaggtttggcaagaatattattgcagtgatgggccatggaatctaattatgtaccatggaagaggctgctagtttgggaggaagtaaaaaacatccatgaaggctatttttcaatgatgtctaagagtgtggtgaaagtagtttaacaagcaagaagaggctgtggttaaagagtgggatcctttggaagtggaacagatttattgaaggtaattttatggccgacttacataggaatgtcttaatagaaagttcaatttttataacacatggaatcttgcccaacaagagtgtgactttttgcatcatagtagcagtaataatatctggatctgggttcataacttgatgtagctctaattatgaattaggataagttttcttctcctttgcccatattatgttctcactggtatcccatcaactgttgtgtctgaccatccctctcatgctgtcatttctttctaaatgggggatcatttcatttctcaatcttttgaatagggtttattgcggtcaacctcactccactctgcagtgagccttcacttcctaagtgtgtgatttctacctgagccctgggagagagcatttcttgctaattttctgtttgttattaacacaggtagcttgtgtctctaaaattgacactgtgatttaaaattggaaattcaagcgtgatagtgagcagctggggtgaggtatatttggggatagtatttcagtgcctgaaatcaggccccagcaacttctttctttagcctagttggtactagggctgcctttgttgtgccttactatttataaagtctgcctttgagttgtctgatgtaaagacactttattagttttctattgcagccatgacaaattaccaccaacctagcagtttaaaacaacacaaatttattatcttacagctctgtaggtcagaagtctgggtgggctttgctagtttctctgctccaagtcttacaagactgaaatgaaagtgtcagctggcatgggctcttatctggagggtggggtgttgtgagggccagagggtgagaatccacttccaggctcattcaggttctttgcagaagtaagtttcacctggtcattaaatgaggaccctctttccttgctgactattggctggaagtcattttcagcttctagagtccaccaacatttcttgtcatgtggttcccttccttcatcttcaaagtccgcacttatgggttgaatcttttgcacgctttgaatctctctgacgtcctttctgcttcatatctcctgcttgcagccagagaaagttctctgcttttaaggagacatgattagattgagcctacgcagataatctataagaatcttcctgtttaacatactttattcttctgtatgtaatatgtctttttgccacggtcatcttccagtttttgtctttccagcagtttaaagatgatgtgtctagctgttgttgttattgttgtttgtatttattttgtttgatgttctgtgagtcttttggatatgtgatttggtgttcatttattttaagaaattatttgagtatttctctcttcaaacatttcttctgttcaattctctttgtcttccgagtttccaattacatgcatgttgcactggttcatactacccctcttgaatgccctactttaaaaaagtcttcattctttgttctttacttctctattattttttcatttctgatatttcactttgattcttatccttttttatctcttctgaaattattgtctgattatacatactgtctaccttttccatgagagccttaagcatgtttatcatagttattttaaattccccatgtaatagttccaacatctgtgtcatatcaaagtctggttatgttgattgatttgtctcttgacagtgtgttataatttttttcttttggttctttgcaaattttttttaaaaaaactgactttgtgtagtcatatgtagacattatgtaggacagtagacactgagggaagtagtttttatgcctgaacatttgcatgcattttcttttgttaggcctttagtgtggtagtttgagacaactgggtcattagttgagctgagtttgcattatgttattgccatggctaccccagtgcaccacaggcctcaaatttctctagcattatcttataaagtcaagactgatttaccagagagtattttttttaatgtctgttctatcctaccctcagctttggatcttccctttgagcctacaaccaaaagaaggtttttctccaacctttaaatgctcccctgggcagtagactactgttacttgttattcaatgattattagccaattgataggggacattgaggaatctttttgttgttctgattcagccttattctttttttttttttttttttttttttgagacggagtctcgctctgtcgcccaggctggagtgcagtggcgcgatctcggctcactgcaagctccgcctcccgggttcacgccattctcctgcctcagcctcccgagtagctgggactacaggcgcccgctaccacgcccggctaattttttgtatttttagtagagacggggtttcaccgtgttagccaggatggtctcgatctcctgacctcgtgatccgcccgcctcggcctcccaaagtgctgggattacaggcgtgagccaccgcgcccggcccagccttattctttaggaggctcaatgttctgggtcttacgagtggggtttctcactctctgtggaaggtctctaatggtctggcctagaaggtattcccatccctcctgtaggaatagagcatgttttcctgttcccttattctggctgcagcggatcttcacctatgccctggagcaacaagatggttgttcttcccccgtggggttaggtttatgctccataggaaagataaaaggatctgggtggttttgagaatgtccatgggaggcattctcagaactctcttgctgcttccgatcttttctgtaagtaaccatgaggttcgtgaagagcccacaagtagataaaaactccctttgtgtccttggttctcagggattctgtattcgaatgatagtctacatttccaggcttttaggaattcattaaaaattttaaccaaatttatcttactagcttctatagcatccagtggcatctctttttggatatgcttatctttgatttcaggtttccctgcaactttagctctttgatgaattttagaaacattacaaatttgaagattatttggtggttgtttgttttctttcttgcttgtcgcaaaggtgggagtaatgtttacatcctaagtggaaaccagaagttcaatgttttacaaaagttttaggacactttcataatatactcctgttttaaaactgcaggtatgccttattccttttattagttttcccaatgtatacattacaggatatttatcatatggtaaaattgtcctggataaaatactgttgcttatccgtctggttaagtatatcctcaaagtacactcgctctaatgaagcaaggcagcaaaggaaatacttgttcaaactgttgctttgtctctccacactcactttatctcttctttgttctccttctcatttcttagtcaacttactgtttttagcaccagccacatatttctcaacttggacaattttgtaaataataaatttatttcttatcttcatcagcaggtgagacttacaatgaaactcattgtcttatattcagaatatagtctattagggatgagttccaactctgcacttgttttagttaatctgtcaacagaatttgatagtgtccactttctatttaataagatacacatgtttttccttatggattccaaaactccattgtcttttctcttacctcatgagctacttcttctcagtgtcacttgttttgccattttcctccagctctaaatatcaagaatctccaaggattaaaaccagatgctttatctttaccacatatcaatctgtgaatcaactgacttggactattttaatgacagagtccacagataataataagcagttacactaagtacctcacaatttccctgcatcaggagctgagctgtgagcaggcggaaccagggtcaaatttaaggtttgattctcccttagcaagtagcttaacatctctgggctcaagtttcctcatttgcctggttttcctcctttctcactggctgctattaagtctcctttgctgattcattctcattttaccagtctcttaaattggagtgtcccaggactgagttcctggatctcttctatctgctctccctcccttggtgatctcatctagtcttatgactttaaataccgtctaaataccaacaagttccaaatttatatctctagccctgaccactcccttcaacttcagatccatttatccaactccctacttaatatctctatttggctttctaatagacatgcaggtttagcatgttcaaaatctagcttctaaattcctctaccccatattttcctgtcctgtagtctttcccaactcaactaaagacaactctatctttccattacttgagtcaataaaactggagacatccgtagctcctcataaatttctcttttgattcatctacaaattttttagctctgctttcaacttttatcaagaaatgctttctctatttttcttactcaaattatctcccaccttgattgaaactaccaccatctcttacttggattattgctatagtttcctaaatagtttccctgtttttggctcttagaatagtctcaagatagcacccaaagtaattctgtaaaaatataaatcagattttaatcatttctctgctcaaaaacctctaataacttaccatcacagaataaaagccaaactccgtcagtgtcctctaagaccctatccatccagcccagttacctctagcttcacctcttcctgttttctcctcgcttatcttcctatagccacagtaaccaggcatgttcctttctctgagtctttgcactgggtattccttcagcctagaatgttcttcctccaaatatctgaatggtccattattatcatgatctgtttcccttccttcagggctttattctaaagtgaagcctcctcctctatctatcaaagattgtgccccttcccaccttgactcttcctgtttccttgctttactttcctcctcagtatttatcaccagctgtactcgttaggttaggcttgattgtgtctcaacaacaaacccccaaatctcaaaggcttaaaaacatacaaacatatactttttgctcaatcacttgtttaccagggcctctgttctttgtagtcactcaagacccaggctccatctggtcaattgcttccttgcaggacaggaagaacagagttggagggtctggcaccaacaatttaacgaattgacctggaagtggcttatgtcccttttgtgcacaacctactggtgagaattagttacatgattgtgactaatttcaagagatggggacatataattttcatgtgctcagaataataggggaatcagatatcaagaaacagcagtggtatctaccccatcatttgacatgccatatgtgtgtgtgtgtgtgtgtgtgtgtgtgtgtgtgtgtgtgtgtgtgttgtttttcttttttttttttgagacagagtctgagtcttgctctgtcgcccaggctagagtgcagtggtgtgatctcagcttactgcaacctccacttcccgggttcaagcaattctccctgcctcagcctcccaagtagctgggattacaggtacatgccaccgtgccaggctaatttttgtatttttagtagagacagggtttcactatgttgggcaggctggtctcgaactcctgacctcaggtgatctgctcatcttggcctcccaaaatgctgggattacaagtgtgagcccccatgcctggcctcacataccacatgttttacttattatttatttatttatctcttctcactagaatgtaaactcaatgaaagtatggctttttgtttgttttattcactgtttgttttgttccagcttatggcagagagctttgcatattctaggtgctcaataaatatttgttaaataaatgagtgactggatttttataatgattttaagagaaataaataccaaccttccttgcagatttgtagatagatgcaaaagattccacgtgtaaagtattgttaatactattacttcttgttgtatggtagaattctaattagaagacatctgtgaaatgggagatataaaaatattatccaaacaatggaggatacaggcagagaatagtctaatttaaaatcttatgaagaaaagaaacaaataagtcaaacatctaatacggctgccactatatttaatagttgctaaatgcatggaaatcatccaatatcatttacagggcaaaaaaatagtcccaatgaacatgttgtaaagggaaactgaatcagcagtcatttgtgaaagtattcatcttcacttgttaaaaagtccacccagccctgtgccttgccctgctctgatgatgctattgagacacccgtctgacatgcatggagtattgtacttggatctctgtcagggacaggaccgtgttcttttcttggatccagtctgttcttttactgagcagacagcaagcccttcatgctagaaatatgcagctgggattctcaacatcaaaacttccacttctgtctgatgacacatgtgctgactgctccgtgtggttatggaatgcctttgctgactttatgagaagagacatgtcttactttccctgcccaatctcttgccagttgagctttatgattcgtaaaaaaaaaaaaaaaaaaaaaaaaagacaaaatttaaaacattaaagggatgataaacacgtttacttttgccctgggcttggtggtgacatgctatttcttgataattatgagagctgctaataggcattttccatgtatgcttttatgtcttgtggatttatgtgacagtttatctggtgccttagttggggcccagaattgtagaggaaaagggttcaccaccccattagtaataatgcagatggactaatccattggcactcaaacaagattttcacactaagattatctaccaagatcatccatgtgtgatgtaaaggtctgtggaactatttggatctaggttggtctcattccacctgtttttgaagggcatggctgagacttatattgtaaagtacctgtcattcttaacatagtcagtttattgctactttatttatttaaataaattataacagcaaaggatagaggaaatggataaggaatgaggaaaggctgccagagaacggctattttaaaaataaatgtactgaaggaagggcatgtacgtgaaaataagccttaaattgattagaagggatttcgtgactgatagtgagccagtgaaattctatccaaagggtaattccaagatttcatgattcccagccttctttgtccttgtttataattttaccaaaagaaaaaattggagttgttatctttttggtctgaagttaatgcttcctgtttgtattgctgattccaagttttgggttattatgccacattagaaaatagcaataagtctttcatatgaccattgaattatttctaaataattaaaagaaattaataataattaaaaggtaaatatctcatgtatatttctaaatgctgtgtttgagaggagatgttctgatgcgcaccagaaatataatgcctagaggtcactgtatctggacctttgttacacgtactagtgtttgggagtgagaaagacagttcatcctaagagctaatctacagtctggccccaagagggagggagaatagttacaattaattttaagtttctcccaactccgagtttccaagtatctatgagcatgatcctttctttttaatcaaactggtctatttgctttttttaattttgttcagggtttgcagttcaacatgagcttcttgctactactattttttacctggaacattctttcaagtcctgccttttatttgactcttattttcaaagctaagctgaagtctcaccttctccataaacctttgcctagagaataatatccactccctcaaaattcaagaaatgtaaagcattgctttgtatgacaatcgtctctctgtctggtaatctctttgaggtcaaaaaaaatagtatttctttctccgagaagtgtttctaacagtatcttcttacatgcctcagaaaaatccttattttcttttgcaaatgtaattttttgcatatagctcttatcgtgtgtcagagttaactcctggagatcagtatccctcactactgatgggtgatgtagtatcttactcatttttgcatacacgctatttagcctgtgcctatgacattattttgtgatagtctattttttcttcatttatgagtatagccttattctgaccttgattctgtgagcattaaggagtcacgtgctgtttttgtccagcaggggcagacgaaagagataatgtaacaaagtagtattgtacagtgattaacccggaaatagtgggaagggtggattggaaaggtaatgaggttggtaattataaaaatggaagactggctggtcttttcaggccaagcctttggatattatgtaggcacaggagacaaaattgcctagtgtttgaagcccagaaatgcatttacccaaaaatgaatgagcccatcctacatgggtttgaaagaagtatatttgaaaagtgaaaagaatcaaagatgacatcaagaggatgcaggatgaagttttagaagctagaaatgcaaagagagagtcaaagagtggataaaatagagcaagtaaacagctcaggggagctaggtggaattttatagaaataaaaggaaagatggtatagaaacttcatctagaatacataaaagagaaacaaacaattccaagttgagatggttttgcatttatgtcctcagtgtcttagtgctttgctgatgggcttcttcctaaaaatacttttctttttttaatgtgtcttatttacaattctatttttttgtttatgaaaatatggaacacttcacgaatttgtgtgtcattcttgtgcaagagccatgctaaccatctctgtatacatccaactttagtatatgtgctgccgaagcctgcacaattttcttaaattataaaatacctatttgcttcttttaatttaaatgaaatctaaatgttttgtgtacatattaatagatcaaatagcatattccatggtgtttttataccaaattacaattagagtgtttaatttttctctagtacaaaagatgcagtatatagtacatatgaaaggcaaacatcattttcttattatttatttttaattaacaaaaatcatatatgtttatggcatacaacatgaagttttgaaatatgtatacattgtagaatggctaaatcaagctaattcactaagctaattgcttcacatgacattttttgtatcttaaaatctacttttagcaattttcaagtatacttgaattgttattaactatattgttattaactatagtcactatgttgtacagtatgtattgtgaacttaaaatgtttcttgagatgagttgatctggaagggagatagttttggccaaaatttaaggaattatttgtagacaagagataaaaatgccttttccccttagagatcagaatattagcaggaggagctgggattttattcaactgtgtacaaatggggtgaactagagttaataaacagtgatcttgttgggtggggctaagaaagaaggtgagataggaattgctggaaaacattgacttatttacaactcattgcaagtaatttaaatgaaaccataacctacatatggtttgtccttaagaatgtcttctattataataaaattttgggctcaagatgacctgcaccaaagtggtcaaggagaaggaaaagaagaaaactcactctttaattagaagtttagcctttcagaagagaaccactgctccaagttctcaggatggtaatgaagcaaagtcataggcatccttgcatttggacttctccatgttttatgcgggttttgagcaaggtgtatataaaacctgactcctcaagtgtgacttgggtgcctaggactgtgacacatcatagatggtagagaagtaaactggttttgagaaagataatgatggttggagcctgaccgcatcaacaaaagtgtcagtggttcacaaagcttgtaggactggaaccaaataagtatccagaaatagaggttaagatatcagaatcagctaagctacttactagttagcagctaagttatgattgtagccttaattgtaaagcagttctctaaaggagcaaaagacagaaactttgtgaattgccatgttatgagggccagaggaggaatagaagtaagggagagagatggaaatttcatggaaaatgagaattaggataccactgtgtcacagagtaaaatcaagatgtagggggaggtggggcaaagggtgctcacacacgtgcatacacatgtgagggcagatgcattagggtggtcagaggtctgcaatgctagagaggagttatgggaaatgagaacttcagacaaatgtctgaaacatgggattctccagtctgcactagacttgtctcagacatttttagaatcattaaaatcatcgaaattattctaatgctggtgtgggaaataatagatattttgttactctccggtgagcagttagtgtggcagataaatgttaagaattagtccacattgttcttttgagaggttttgggcgcatcctatcctcagttgactttagtgtgctgggattaatgtaatgttccctgggcacgtggcctcagccccataaaacaggttgtcccattactgtgaatgactagtatgagatgcctggacgaggatggacaccacagagatcaagtacatgcatatgatgattagagcccttagaaataactctccactcagaagaaagatttccttgtggaaaagatatgaaatgccattagatatttgtaatcttatattaatttttaaaagagagtagatgaaaagagtgtttgaccagcaagagatgttgatagtctacaccttatataatatcatgtagaatgaattatcacagatattaacacctcgaccttcatctttacttttcctcagtctgaaatttccttcttcctgttctctggacaagtccttcttgacattcaagacccagatcagatgccacttcttctgtgataccattcctgactcacccacttctaactagtcagtgctcctctgaattacctctgcatgcgggtccctcctctatgtagaatttgttgagtgcattgagtaataacttacaagtctacatcctccagtacagtacagtttttttgaagagactcatttgtttattatagtattaattcctatcaagcataatattttccattttaaaaaactattgtatgtgtttgttcattcattcaaaacatattaattgaatatcctttctctgccaggcaccgtgctagggacagtatccttatatagcttatagtctggatataaacagcatctatatagaatgaatttttggttggaagacaaggaatgttaaaaattcaaagtacactgaaatgaaaaagaacccaaggataaagtcagatcaaaaacaacccttactgagctgcacagttcaggaactgcttttcacaatctgttttacttaatcttcccatcaattctgagagagttctatgattaatactactttacaggagaaaaggtgacatttggatagtaaataaattatccatataacagttgaacaaaagggcaattgtgggtttaatttgggacttgaacacaggttttccaactccaaaccctgtgtgtggcccattatgttccactatacagtcctccttcttcaaaacgccactccttacaggatcagatgaggaatctcaagatcatggaaatatcagtgcttccatagccacaaattttagcaatgatctcacaaacaatacaatgagcttatctaattgtcatatggattcaatgtaacagatctcaaatgtgattttaaaaaactgagctcgaactttataagatcaataccttatcccaaaaacgaataccaaatttcaccaaaataaattcaattgttggccaggcaaggtggctcatgcctgtaatcccagcaacttttgaggccaaggtgggcagatcccttgatgccaagtgttcgagaccagcctgatcaacgtggcgaaactccatttctactaaaaataacaacgacaacaacaaagagccatgcatggtgttgtacacctgtagtcctagctacttgggagactgaggcacgagaattgcttgagcctgtaaggcagaagctgcagtgagccaagatcgcaccactgcactccagcctgtgacagagcgagagtctgtctcaacaataaataaataaataaaaacttcaattgtgaatttattgagatgatcgttaaactgtgccaactcactgagatgatatagggtcagtttacctactatcaaagaaaattcccaatgaattaattgaaagacagtagtgtcattaaaaataaagatataaagctatatttatattgaagaaaatgcaggttatggaacagcacttggagtataaccttatttttgtagactgtaatatattattcccaggaaaaactatctggaagaacatataaaaatgtttacagaagatttatctgcatattaaatgaataattttttaaaaatattctcttttccaactctcttaaatttcttattaaaatgaatgtgtacaagttgagtatcccaaatgctcaaaggaaatgctcattagagcattttggattttgaatgtttggatttgtgatgctcaaccagtataatgcaaatattccaaaatcctaaaaaattctgaaatttgaaaaatgtctggtcccaaacatttaggataaaggatactcaaccagtattatttgtataattttttaagttaaaaagtgaatgcagggactattattggggtagaggaaagggagatgaaaatgtgccaccagcctgggagggaagtgaaatgagtgatttgggaaagacagaagtattcatatagtaagttgtaagcagtttaattctcaggctgtctctgccaattgcggcaattaaactgcaattgctttgttttcatcaagcttttggctaaaaacagaattaataacaactgattttagtaacacattctgtttgcagtaaggacttgtatggatcgaattccatttaaactataatctagttgtaaaatatgtttggcacttttcatttttaaaatagcatttttttctactgaaatcaaatcttgttctgagcatttgagctgcttgttgctaagaacttgtgaggcaacttttctatcatgtggacttatttttaatcatctaagatttgaattttgtattattcatttctcagaagtttggcttgtgtgtagcttcatagggaaaaacaatttagctttgcttctaacacatattttaatgtattctaccagggccctctgtcctctatagcttccctgcatactccttaacccattatatcccaccagactgtctttgtttaggatctttaaatccatcatctacttcctccctcagcacctttgctcatgctattccttatgtctgagaatgctgttcctgccctccctcttcacccaatatgcacacttaaacgttggctgactcattgctacccattcattaaatgtgttacctcttcagatcacagcagttatggagctattgaaggtttgggcacctcagtcccgcaatctttgattttccctctagtgttcccttgggtctatttcctgctaccaataaagtgccttatccgccactctttatctttttttttctcagcttcatagtttttgctacctaacagtttactatctcaacttcaacttactccattcccttattctgtctcctggcctctctttcttaccatttaaattaatttatttcacactggggaatagtataaccagtgggaattactatattcatatttgcagtgtctaaggaacaattccccataggcagtatttggactactcaaaggacaatcacatctcttcacttccaagttcagagttttgagtgaagtgaggaaattcattgtagctcctaggtttaaaatacaagaaaaaaaaatttgcctgataaaaagttgtgagacagccttccttcttatttctgcaatttaaagtcaggaagattttttttcaaacggattcattcagttagattttgcgaacattggctaaatgttataaaattctattttaagcacctagtcttaagcttgggccacacccactagatgaggaaattttaataatgtcagcctagtaggcaatgatgccaagccactttgactttctttttctcacctagtaaagctcaaatacgacattaatagcaaaccatcagagatgttattaatgagatatatcaggtatgtgcatagttcaaaatttcaatattttattaatattgaaaaacattttagactcaaaatgttttaattattaccataaaaatgacaaatattgtcaaaatagtaataattccctagtcaggaaagatagctatttattttcatagaaaaacccaactgaagcatttggttacaaagcaaaatgtacacgtaatttcattttaattttaagtacaaataaagttaatgtcttcagaactgattaatttcatggtgaacaaatattcacataattagtatagcctaaactattcttaaaactggaatgactggagattgaaagacaactcagtaatttattctgcttcaaattcaaactcatttcttttctttttttttttttttgaaacggagtttcactcttgttgcccaggctggagtgcaatggcacgatctgggctcaccgcaacctctgcctcctgggttcaagtgattctcctgccttagcctcccaagtagctgagattacaggcatgcaccaccacgcccagttaatttggtatttttagtagagatagggtttctccatgttggtcaggctggtctcaaactcccgatctctggtgatctgcccacctcggcctcccaaagtgctggaattacaggtgtgagccaccacacccagccttcaaactcatttctaacaatgtcaatggtcattgtattgttttgcaaaaagtgtatttcttgttttctggataaatttggaatcacaataattattataacaaaataagtgatctcatcttttttttttttttttttgagatagagtcttgctctgtcacccaagctggaatgtgtggcatgatttggctcacctcagcctctgcctcccaggttcaagcaattctcctgcctcagcttcctgagtagctgtgattacaggcgcatgtcactatgcttgactaatttttgcatttttagtagagacagggtttcaccatgttgcccaggctggtctcgaatgcctgacctcaggtgatctgcccaccttgtcctcccaaagtgctgggattgcaggcatgagccaccatgttcggccaatctcatcttccttaatgactaaagatagaaatcccagggcttaaaataattaattttattatctaacgtatatttagtgacattgataaaacaagacagctcattttctggatgatcacaatttggagtggtcctcaagcaagagaaatattcacaatcttagcaattcatataaaactggaaaagtttgggagtttcttaataaattatgcattaacttaccgtatgactgaacaattttacacctacatatttacctcccaaaactaaaaatatatgttcacacaaagacttgtacatgaaattttatagcagcactattcatagctaaaactggaaacaatccaaatatttgatgaatatttggattgaataaataaaatgtaatatattcataaaattctatttagcaaataaaaggactgaactagtgatacagcatggatggatgagtctcataaaaatgatgctgaatgaaagaagccaggtgtgaagagaacatgtcatgtaagtccatttatatttaattaccagaaaagcagaaagtagaccagtggttgcctagagctaagggtgggaacagagagatttactattaatgggtaaaatggaatgttttagagtaatggaaatgttctgaatatagattatgatagatttagtaaattacataaatttagcaacttctgtgagtttgagctataaaatcattgagctgtatacttaaaatgggagaattttatgatatatgaattatatctcactagagctgttaaaaattatatgtgacagtcacatatatttcttccatatgctcgtgaaaatatttgttcctttttttatatatttgaagtacaattggggagacctgtgaaaaaattatctggaaattattagtgtttccttaaaaaattattttctgatttatttggattttcttgcactttagtaggaagatagtattttttctggatgagatgttagagacacttttgagtattagattgagaatgaatttgagattcctcaaaatattttacagaggagaaaaatgaggcttagagaagacagccgacctaaagtcaaacacaattaaaagccaagttgatctcagaacccctcctgcttcttccacaacatgttattaataatatgagatgcccacagtggagttgagagcaaatggcctttcttagagcctcctgacatctcatggccactcagccttagtatatgaggccacttggccatattctcaggataagtttagccatttccctgcagtctttagaagacttttgatgctgtgaaatctccaaatgaacaagtatataccatcagtactgggtatttatgaactaaataaattacaaacaattcatgaagatgccaaatgtctaagcaaagatggcagataaaaccattggttccagtttcatctcatgttttttatttgcaaaactttaaaaaatcagatttatttaagaaagctgtgtgattttttgacaatgtttttgcaagatggcaagattttcattttttatcaagagtattttcaatttgctccctggaacagtgttttgcaatagaaatatgtaatcttgtacatgcaggatgttttaatattggtagaagtaacattttctgctttgtcctgtaaataatcactctgattaaacttaacctctatttggccaatggaatttaatgagtgcccaaactggagttatcaagagaagaaaagaaaaagaagtatgagtccttttggaaaattactcagagtaatattaatttaaatgatatattttctattttttgatacctgatcactctgagaattgtaaggacaggatttttaaaaattaaaaacagttaaacttatctactttcatcttcatgaaaatcattctttgacataagaaagtcaatattacacttaattgtcaaaagaggctcatgcctggcattctctcagctgggagtgagagggaaaggtgtcagagaccttgagtatcagtgtccagtatttagcttttcagtgaagatgaagtcattatatggttttatctgcgcttactactaagaagttagttaagtgtagtaattgtctattataaatagaagagttgatagttttgtttccctggtaaatagcattataagtaaataatctggaaaattagaaatatacatatataatttcactttttcttggaaaaaattttatcatcatataatcaaacattttaaaaatagtacaatcaaaagaggctgattatgaagacaactggaagatgtaaaaatgttggctttaataactatctgaatactactgtgacaataacaacaaaaagctactgatgcatgcaacaaaactgatatatcatcaagacattttaagtgcaagagaccttacatgaaagactacatactgtgtgattttatttaatcgaagagtctagaacaggcaaactaatctatgatagtaaaattaagaacaatagtccctgggaggatgtggtgggaatgaactgggaaggggcatgaggaaattttctgggttgatgatgatattataaatcttgataaaggtttgggttacacagatgtatggcatttggggaaaacagtaatgtatagttaagatttatgtatttcattgtacctaaattttatctcaaaagaaaaatataaataaatattaaactttagttaatggcatgcatactgaagtgtttgggggtgaagagtactgaaattcagttgacatggaaattaattaaaaattaagatggaatgaatgatggacagagggatggagagacggaaatgtacatgataaatgagtaagacaggaatcattgacttttggttgctgccttatggatatgctctacacaattcaagtttttgtatgtttaaaattttttataataaaatttggaaaataactcatctttgattttaaatctctaaatatattggttagatttaaagacacataactgacattcagaagttagtagtattccaaacataacattttaccttatgtgtctccagaaatagttctcagaaaccctaattaacagaatttgttcacagaccaaaatatgtgtaaaagtctcatgataggaaatttaacagtgaagtttcttttctccatactgtgttgaatatctgtaaatgtctttcaaatgacattgggcccattaattttattgtcgatgcactgaattttaaaagagtaatggctctcaaacttgagtattcaccagaatatccatacagcttgtcgaaatacagattgctgcccccagagtttctaattcaataggtctgggatggggtctcacaagttcccagatgatgttgattgtctaatctggagaccatactttcagagccctggaattgagcctagcccatcttccatcaagagcacttaatactaccacttcttactttaaagggcaacagaatgtaagcaaatcatctccatgaattttcatgaaaataagcaaagaacaaaaagaagggaaatgagtcttgttaaattccttagcctatcgggttacttttctatgtattaaaaaacaataatgactaagaatctaccatttttccaaagtggtacagaaaaagtattacaaaataaattttgacaccttgtatttttctcctttcttccctacctgcttttggtatatctatcctcatgggataaaaactacttttgtgactaattaaacaaaactaaagggacgttttctatatatattctttcttccaccccttttatatcaggttcagaatccctcaattgtagcgttattttactaattctgctaatcatgctgcactgaaacaactgacttattcatctacccaatgtactagaatgtccagtctttgccatcagacatatcatattcaaatttgtgtcactaatgcctactacccagtagttaatgaaaggaataaaataaaaagcagataagtaaaaatatatttgtcccaaggtaaatataaattttatttagtttttttggtcagttgaagttaaccatgtcactgtcccacttcctttacagcaaatacctatatatgatcattgattgtgtgaggttgcctctcccaccttccccttccaaaaaaaccccagcgcacttcaaactttaaagagtaattttagcataatcagattgagggaatgtgtgcaattgacacctgtgtatgtctcagaatgaggtgtcttcttgaaaatgagagactgttgatttagaaagtagtctttgaaaagcagttttcctacttggctgttggttgggttacaaagtcagtaatgtagttactgctcctttggtaaaactattagccttgccaattggtgctgaaatgtccacattggcagttcagtctgtctcattcagtcatccaaattcaccagacggtgaagtattggcctgaggaatcagagcactgggaattctgaccaaggtggaaactggtggttttagctgaattggaactcatttgtgcaaacagctgggcaaacagatataaagtgccccattaggaagtgaagattttcccccttggactttttgtaaagtgacatttctttctaaattcgaaagtaaccgtcttctgggtatttggtgatgaaaatgtcctaataaaaagctcactaattgactcctaggaattatggatctatgggtattgcttgggtgtggctttatgaagggagtgctccaggtgaactgagacttttaatttcctgaactctgagaacacatgttgcgtgtgggagcatgtcttccagctggcagacttacaacaaggcatcttggagagggaacgtgctgttctgcttgccctggagcagagatcatgaaatgctgtcatttgagcttcttgctaacatatgttcatgtataagtaaagttttgatttttttaaaaagcccccattccttggcactgaggcagctatctatgtggcttatgggacttttaccatagcttttattctgcacattattttaaatgtaattattctttagatttatacaaatcttgctttatttaataattttaatcagaattttttcttgtattttctgatttgtgtttatagaacacaaatagggatgccatctgtccacctctaaatctgtgtgctattaatttacaaaagtccagaattgcttttcctctatattcttatttaaattcctgactcatcatatcatatatatatatatatatatatatatatatatatatatatatatagtgaagtaatttcctttgtaaatgagggattaccatgtccaaagtgtttgtagctgagttcctatctagcctgcaccaggcatcctactgctagtatccctagttaccagtaatagcagaattaagaggcagggaagataaaaatgaaaggcatgcagtgaaaagggcaggatgggtggggtggcttgaggcctatgaggaaaggtcggaatggtaggttggttaccgttatcaaatctttcatttgtgtaagtagcaactatttttgcatggcctttgtgaatgtggctaatgtatatagtcacaaataaaagatggtttgaatggtgccataataaagatgactgttgcgggaagtcagggatcccaaacggagggaccggctgaagtcatggcagaagaacgtggattgtgaagatttcatggacatttatttgttccccaaattaatacttttataatttcttatgcctgtctttactgcaatctctaaacataaattgtgaagatttcgtggacacttatcacttccccaatcagtacccttgtgatttcctatgcctgtctttatttttatctcataatcctgtcagctgaggaagatgtatgtcgcctcaggaccatgtgataattgcattaactgtacaaattgtagagcatgtgtgtttgaacaaatatgaaatctgggcaccttgaaaaaagaacaggataacagcaattgttcagggaataagagagataaccttaaactctgaccaccggtgagccgggcggaacagagccctatttctcttctttcaaaagcaaatgggagaaatattgctgaattctttttctcagcaaggaacatccctgggaaagagaatatgcgcctgggggtataggcctatagacggcccccctgggtgtggtcatctcctatggtctatagactctaggggtgaaatagaccccagtctcccacagtgctcccaggcttattaggaagaggaaattcgcacctaataaattttggtcagaccggttgctctcaaaaccctgtctcctgataagatgttatcaatgacagtggtgcccaaaacttcattagcaattttaatttctccccggtcctgtggttctgtgatcttgccctgcctccatttgccttgtgatattctattaccttgtaaagtacttgatgtctgtgacccacacctattcgcacactccctccccttttgaaaatccctaataaaaacttgctggtctttgtggcttgtgggggcatcacagaacctaccgacacgtgatgtcttccccggatgcccagctttaaaatttctctcttttgtactctctccctttatttttcaagctggctgacgcttaaggaaaataggaaagaacctacatgactattggggcaggttcctcgataaatgataaaatagataaagataaataaagataaaatagataaagatgataaaaagatgtttgaatgagtttttcactgcataacctgaacaactgtcagcgacatccctctttctggaagacatgttttagagcagctacatgttcactgcccactaattctctgtaagcactcagaaattccctactgggacctagtaaaactccattcccaaagagttgggaagacagtgatggagaatctgggattttgagaaaagattccagcctggaggtccagagagccaggataaaatgagatatatggaattggtagttggaatataagaactttaaatttagaaaggatttgcctaacaattattctgtgattccaattacaatttggcacacacacatgcatgcacaggcacatgtgcatgcacacacacatgcccccccaacaacgtccaccaccaccaaagcaatttaattccttttacctactttgttctttcatgccatcataccactgcaggaggggccatgactttgttcatctctacaaccaccttacacagactctccttctgatggaaggtcatgtaagcgtcttgctgtttcagcactggtgaaaacacttttaatactgtctaatattacttaattgataacatcatttaattttcattctccttaaagtatttagctgaagctgccatggttttttgttatgaaaatttccactagcatcactgactttcagcttgtctttgataagaaaaaagtcattttacggactaacacacaagactacacatttctatataaggatcaggaacaactgaagatacttgtataattgtctctggccactgtcttcacagtgattcttcattgtcacagggaaattactgaaactccatggttttttccttttaatacctttccttggattcctggtggcaggacagggagagtcatttgaacagaaagcccatgctatgtgatcccttttcgactccctaagaattaaagaaaatgttaaattattgccaatccctatgtttgcttgtttttttttttttaacttttaggttcaggggtacatgtgcaggtttgttatatagggaaactcatgtcacaggagtttgttgtacagattaatttgtcacccagctactaagcctagtacccaatggttattttttctgatcctctccctcctcccatcctccttcttcaagtaggcatcagtgtgtgttgttcccctctttgtgtccatatgttctcatcgtttagcccccacttataagtgagaacatgcagtatttggttttctgttcttgtgttcgtttaccaaggataatggcctccagctccatctatgttcccacaaaggacttactcttgttcttttttaagattatagtttgtatatcttagtgttaaagtttaatttaatacaatctatgtcatatactatgatttttggaagcttctgacagtgactgccctgcttaatacataaacttgagacgtgacatcttgacagctccttcataaactgatgtgaccataaaggcattggaacgttttctacttgtaacctgctgtcaaagcagagcatagactacgttggaaacttagcattgtccgttcttagagcataataattcctgaaaaggacttgctaactttatgtttgttgagtggtgaataataatattagaccctattaaaactaattctgcaggtgctgtaagatgcttgaatgaccttccatccggagagtctgtatagggtggttatggagatgaggaaagtcatagcccgttctacagtagcgtaacggcatgccagacaaaagattcaactatgttgtgtatgtaggtaatttgttctgttttattgctgagctatatctcattatagggatgagctataaatgtttatctgttcaactgttgatggacatttgggtttgtttctagtttggcactgctttaaatatttgcacacaagtttttgcacagacttgtgtcttcatttctcctgagtaaatacctaggaatgaaattaataggttattagctaactggcaagcattttcccaagtggttagaccatttaaaatttacactcaaaatgtatgaaggttccagatgtactacatttttcctaacacttgggattagcagtctttaatttcagccattcttatgtgtaatatttcactgtggttttaatttgcatttccctaatgactcatgatattaaccaaaagttggcaaactatgacctgcaggccaaatccagcccactgcctatttttataaatattgctctattggcaaacaatttcaaaagatagcagaagacaaggaatagtaaaatcagagcagaaacgaaggagacagagacatgaaaaacccttcaaaatctcagtgaatccaggagctggttctttgaaaagatcaacaaaatagatagaccactagccagactaataaagatgaaaagagagaagaatcaaatagatgcaataaaaaatggtaaaggggatattaccaccaatcccacagaaataaaaactaccatcagagaatactataaacacctctatgcaaataaactagtaaatctagaagaaatgggtaaatttctggacacataaccctcccaagactaaaccaggaagaagctgaatccctgaatagaccaataacaagttcggaaattgaggcagcaattaatagcctaacaaccaaaaaaaaagtccaggaccagacagattcacagccgaattctaccagaggtacaaagaggagctggtaccattacttctgaaactcttcaaaacaataaaaaaagagggatttctccctaactcattttatgaggccagcatcatcctgataccaaaacctggcagagacacaacaaaaaaagaaaatttcaggccaatatccttgatgaacattgatgcaaaaatcctcaataaaatactggcaaaccaaatccagcagcacatcaaaaagcttatccaccacgatcaagtcggcttcatccctgggatgcaaggctggttcaacatacgcaaattaataaatgtaatccatcaaataaacagaaccaatgacaaaaaccacatgattatctcaacagatgcagaaaaggccttcaacaaaattcaaagcccttcatgctaaaaactctcaataaactaggcattgatggaacatatctcaaaataataagaactatttatgacaaacccacagccaatatcatactgaatgggcaaaaactggaagcattccctttgaaaactggcacaagacaaggatgccctctctcccactcctattcaacatagtgttggaagttctggccagggcaatcaggcaagagaaagaaataaagggtactcaagtacgaaaagtggaagtcaaattgtctctgtttgcagatgacatgattgtatatttagaaaaccccatcatctcagcccaaaatctccttaagctgataagcaacttcagcaaagtctcaggatacaaaatcaatgtgcaaaaatcacaaccttcctatacacaaaaaacagacaaacagagagccaaatcatgagtgaactcccattcacaattgctacaaagagaataaaatacctaggaatccaacttacaagggatgcaaagggcctcttgaaggagaactacaaaccactgctcaaggaagtaagagaggacacaaacaaatggaaaaacattccgtgctcatggataggaagaatcaatatcgtgaaaatggccatactgcccaaagtaatttatagatttaatcctatcctgatcaaattaccattgactttcttcacagaattggaaaaaactactttcaatttcatatggaataaaaaaagagcctgcatagccaagacaatcttaagcagaaagaacaaagctggaggcatcacactacctgacttcaaactatactaaaatgctacagtaacaaaaacatcatggtacttgtaccaaaacagatatatagaccagtggaacagaacagaggcctcagaaataacaccacatatctacaaccatctgatctttgacaaacctgacaaaaacaagaaatagggaaaggattcccaatttaataaatggtattgggaaaactggctagccatatgccaaaagcagaaactggatccgttccttacaccttatacaaaaattaactcaagatggattaaagacttaaacataagatctaaaatcataaaaaccctagaagaaaacctaggcaatacgattcaggaaattggcatggccaaagacttcatgactaaaacaccaaaagcaatggcaacaaaagccagaatagagaaatcggatctgattaaactaaagagcttctgcacagcaaaagaaactatcatcagagtgaacaggcaacctacagaatgggagaaaatttttgcaatctacccatctgacaaagggttaatatccagaatctacaaagaacttaaacaaatttacaagaaaacaaccccatcaaaaagtgggtgaaggatatgaacagacacttctcaaaagaagacatttatgcagccaacaaacatatgaaaaaaaagctcatcatcactggttattagagaaatgcaaatcaaaaccacaatgagataccatctcatgccagttagaatggtgatcattaaaaagtcaggaaacaacagatgctggagaggatgtggagaaataggaacacttttacactgttggtgggagtgtaaatcagtccaaccattgtggaagacagtgtggtgattcctcaaggatctagaactagaaataccatttgacccagcaatcccattactgggtatatacccaaaggattataaatcattctactataaagacacatacacacatatgtttattgtggcactgttcacaatagcaaagacttggaaccaacccaaatgcccatcagtgatagactggataaggaaaatgtggcacatatataccatggaatactatgcagccataaaaaaggatgagttcatgtcctttgtagggacatggatgatgctggaaaccatcattctcaacgaactaatgcaagaacagaaaaccagacactgcattttctcaatcataagtgggagttggacaatgagaacacaagcacacaaggaggggaacatcacacaccagggcctttttgggggtggggggttaggggaggggtagcattaggagaaatacctaatgtagatgatggcttgataggtgcagcaaaccaccatggcacgtgtatacttatgtaacaaacatgcacgttctgcacatgtaccccagaacttagagtataattaaaaaattattattggattaaaacaaagaaaatcactctattggaacttagccatgtccatttgtttatatgatgtctatagctgcttatgtgctatgatggcagagttgaatggttgtggtacagaacatctgtcctgacaaacctaaaatatttactatctgacccgttacagacaatatctcccaaacccagatgttgggcattttttcatgtgcttcttggctatcctatgtctcctttaatgaggaatctatttaaatttttgttatttttttcatgttttttctttctttttattgaatagaaagaattattttctttacataaatacaagtccttcaatagatatatatatatattgcaaatattgtctcccaatgggtagcttgccttttttttttcttgttagttcttttaaaattcaaaactttaaaaatttgacctagtccaatttatcagtttttaaaatctgtgcttcatatgccatatctcaactgacaggaattgactttattattttgatatcttagaaaatttgattttgtataatgaaataagtagctgagtaggtatagaggttggcactgtaagtgaaaattgtgcaataaaagaagaacacactatggataagaatagggttatgtgtttaatcctgaaatgatgttattattttattgacatcagtattatagctattcttttacttagtatcttatggcaattaatacggtacctgatctgttttaagtctatatgtgctatttagaataatcttaatttctttgttagtgtctgccacattgaaaacataaaataataattgttgctacactaataagtattatctacttttagaagagtgctttaatattttgcagcttttctcttgaagtaattttattatgttgaccaacttgagatcaacaatttaaaccacattctgaaatattctggagaatgtaagataaccttatgaaagattagatatgaaagaattcctcctactaaatggattataatgatgattcctttctctcccataagtgactggatgtccatgatagtttagcttgtctcactgagtaccatgtgttagggttatgtgtctttttggtaaaatgatttttattcctttgggtatatacccagtaatgggattgctgggttgaatgacagttctgttttaagttctttgaaaaatctccaaactgccttccacaatggctgaactaatttacattcccactagcagtgtgtaaacattcccttttctccacaacctcgccagcatctgttatcttctgactttttaataatagccattctgatggtgtgagatgatgtctcgttgtggttttgatgtgcatttctgtaacgattagtgatgttgggaactttttcatgtgcttgttggccacacgtatgtcttcttttgagaagtgtctgttcctatgatttgcctattttttaaaatggggttatttggtttttctgcttgttgatttgttcaagtttcttatagattctggatattagacctttgtcagatgagtagtttgcaaatattttctccctttctataggctgtctgtttgctctgttgatagttttgtttgctgtgcagaagctccttagtttaattaagtcccacttctccatttttgtttttgtttgggagactttgtcatgaaatctttgcgaaggcctatgtccagaatgatacgccctagattttcctctgaggtttttatagttttaggttttacatttgtctttaatccatgttgagttgatttttatatatggtgaaaggaagggatccagcttcaatcttctgcatatggctaaccattatcccactccatttactgaatagggagtcctttccctattgcttgttttttttcggctttgttgaaaatcagattgttgtaggtgtgtgtccttatttctgggctttctaacctgttacattggcctatgtgtctgtttttgtactagtaccatgccgttttggttactgtggtcctgtagtatagtttgaaggcaggtagtttgatgcctctagctttgttctttttgtttagaattgctttggctacttgggctgttttgtggttccatatgaattttagaatagttttttctagttctgtgaaaaaaatgtcattcgtagttgatagaaagaacattgaatctgtacattgctgtgggcagtatggccattttaccaatattgattcttcctattcatgagcatgagatgttttccattttttgtatcatctttgatttctttcagcagtgtttcgtaattcttgttgtagagatcttttacctccatggttagctgtattcctaagtagtttttttttgtgtgtgtggctattgtgaatggtattgtattcttgatttggcccttcgtttggacattattgatgtatagaaatgctactaatttttgtccattgattttgtatcctgaaacttgctgaagttgtttatcatttctagtagccttttggcagagactacaggattttctaggtacagaattatattatctgcagagaaacagtttgacttcctctcttcctatttgtatgtcttttatttctttctcttgctttctctttcctgattgctctagctaagacttccagtactatgttgaataggaatggtgagagtgggcatccctgtcttgtgccagttctcagagaaaatgcttccagcttttgaatgttcagcatgatgttggctggctgtgggtttgtcatagatggctcttattattttgagctatggtccttcgatgcctagtttgttgaggatttttaacatggaaggatgttgaattttatcaaaagtcttttgtgcatttattgagatgatcgtgcagtttttgtttttagttctgtttatgtgatgaatcacatttattaatttgcatatgttaagccaaccttacaactcagaaataaagcctacttgatcatggcaaattagctttttcatgtgcaactggattgatttgctagtattttgttgaggatttctgcatctatgttcatcagggatattggcctgaagttttcttttttcattgtgtttctgccaggttttggtattagaatgatactggcctcatagaatgagttatggaggagtccctcctcctcaattttttggggaataatttcagtaggattggtaccagttcatctttataggtggaatttggctgtgaatctctctggctcagggccttttcaggttggtaggctttttgttactgattcaattttataactcattaatctattcaggatttcagtttcttcctggttcaatcttgggaggttgtatggttccagtaatttatccatttcttctaggttttctagtttgtgtgcatagaggtatttgtaatagtctctgagggttttttggatttctgtgggatcagtggtagtgtcacctttgtcatttctgagaaagactttttttaaaagaatttcttaacactctttgaaatattaacagatgcactaaggtgttgcaaacaaaggattagaaaccaccatcgtagatccaagattctactttgcaaatatgcaattttttgtctaaggcctactagtgttactttcccaaaatgtttaccttctgtttttattttttctcactcctgttgacatatgctttgttcctcatatacggtgcaataaaacgttcttccagtagtcttatttttctgaattcctgggctcttctggtgacatatataccatttttacttatagatgttgtactagttaagcttgtatcatgtggtattattttctatgatccctaccttaaggcactcaccagaggtctttatactaactgttgaaagatgccattttatgactagtattccaaactactaaaccagaattacactgaaaataaatgtattatcaaagattaaacattagtgtagaatgtacataggcatacctcaaattattggagaaattgtccaagagtgtaaaatgtcatttaatacacatctaaacattcgttcaaaggaacacttgaacttatttatattgaaggaaaaaaaaacttgcttaacctttttgctgacactgaaagagtcaatttggtaataactgagtaagtcaaggcatgtagggaaggcaaaccaaagatagagggaatccatactgggtggacaacctgagcaaaggtgtagggccaaagcctcatatgcattgcagaatgtgagaggattgtaagggtcaaaaacaaatgagaaatgttgaaaagtaataagagaagaagtaatgtgtggtaagataatgaagacatttgagttactggctctaaaaaaagaactcaggtaatggtcttaaaattaagtttgtgatgctgtgttgagatgagatttgtctgtatgtatttttctctttcagaacattttaaatttagctcgagagagtagtatgaactggaattttagaaaaagtagaacagctaaatgccaattcatttgaatagttatatgatgttgatgtatttgtggatatacattgttagcaaaagggagagagactggagtcatgaaaagtcctgtgcacaggaggtggattacttccactttgtttggaaaaatggaacagccttccttgttctcatctgatgtagccatcttttccactttcccatgggagaaataatgtgattcatcaggccagagtccatgagcaaaagtctaacgtgatgatgatgctgtgactgttggctctttgtcaaatatgaatgcagcctacgtgtactaagatttgttaaatgctccctcccaactaagtgttggaaataagctggttgagtttagattcgttgtgagacttgatagccttctaaggtagcagaatatgtgttcgattttacattggttccattctattgagcagggtgaagtaactagagttaatctaggcacattattaaaaagggaaaaaattgacaaaatctgtgttttatctgaagtataaatcatcttatcaaaacctggcaaagttcacacaaaacactagcagttggcaccccaacttgagcattatgatctgtggtgtggccactccttactcttttggatagttacaaagttctcagtgaaaagagagcagtgcagtccagcctagagagagcccaagatctagttttgacccacttttaacgtgctgggcgcctcaatttcctcatttggaggaattatactagctgatttgtaaggtcccttttcagattttggataagccactcatatccctggctttttattttgccacagtataacaatagcagtctgagattcaagaagtttataaaaatgtcatcaagttcttggaaagtaaaaactactatgcacatacatggaaactatagccttagctgctgaggtatgaataatccccacaacttggtatccaagaaagggttatttttctttttccaaaggcctaattgaacattttctgtggttctattgaggctgtgcaggctgattttgggtggcgtagaataaattcattgtgatgatgttggggagcacatgctgcacaaaagtggtgattggtatttgtacaatctaagtctttgattaatgagaaatagaatgtgaattattaagtcagtaaatgcagtcttttcaatagtcaaaatattttttaaatattaaatctctggggaataaagaaaaaacataatccaggttcagaatcctttatctaaaacccctggggccagacatgttttggaattcagaaatttggagaggagggttagaaaagaactaggatgccaagattatatattacataacttcctcaatggggtcttgatcaacaccatctaactgaacacatttcttcaatgaaacacatgaatagtcaccctagtggattaaagaaagattgaatggcctcaggatggttctgactgggatgtgttgccagatgagtctgagataaacttacaaaaaaaaaaaaaaagacacaaaaaaactacaaagttttttgatttctgaatcatggctaaagaactgtggacctgtattagtaagcacttgttgagcaattactatgggccaggtttaaggttgtgccatttacattaactgattgatatgatttggctctatgtccccattcaaatctcatgttgaattgtaatccccaatgttagaggtaaggcctggtgggaggtgattggatcacaagggtggtttctaatggtttagcaacctccccctagtgatagagtttgcacaagatctggttgtttaaaggtatgtggcaccttcctctttctcttcctcctactctggccatgtaagacttgcctgctttgctttcaccttctgccatgaaagttccctgcatttccccagccatgcttcctgtacagccttaggaaccatgagccaattaaacctcttttctttataaattacgcagtttcagatatctctttatagcagtgccacaacagactaatacactaacctttgtaaataactcagcaagaaggtaaatgttatatatcacttagaaaccaggaagataaggctcgagtatcttcagtgggatgccagagtcacagaagtggggtttgaacctggttccttctggctccaaaggcaaaagacaatgtgtttcctcaccatttggtcaagacctttagttagtgtgattatttgcctctgttgccttagtagtttaaaaataaatgtcttgagaatttgattaaggtctctcttctcattcttggcatctctctgggaaagttcatccaattatcacttataagctaatgacacccagatgggtctcgacccccatcctgagtatcacacttagaaatcccactcactactgggcatctccatgtatttccagatgtactcccagatgtactcccaatggaactaatcattttcctcctcaaccgttctctgccttccagcattccctattctaccatgtcagttatccctaagacaaaaatcttttttcttccctctgtttccaactctgtcaatgactaagacctgtggatgtggcactggaaagcctcataaaggaggctgggcgtttttgagctgtagtaattcaattttaccaataaaaaaattcaggtcctttcaccatacccagacagtgtgtataaagcaaaggttctggccaactttgaagagccaaaataaaccaaattgcatctacctgcccaataataaactactaagtattgaacagtaagatatactttttattctaggctgctctatgttatttagcttcattttgggcgtttgggtgtgtgctgtaatactgagtagcaaagtagacaacatgtttttcaagaacaatgcctctagccaccaacacttgctgggaagttgggtaggatgctaaaaaggggaagtaacagccatcgatgttttcattcccattgttaggtaaaaggccaaacctcaaagtccacatcaataccacaagtgactccatcctcttgaagttcttgcgtccaagtccaaatgtaaagcttgaaggtcttctcctgggatatggcagcaatgtatcaccaaaccagtacttccctcttcccgctgaagggaaattcacagaagctatagttggtaaggtgtttgggtatcgggctgggaaggaaaggaggtaagaggtgggggggtgtaacatgacctacaaatcttgatgtcaagaactattttttctacatccttagcttaatcaaatggtagaattacaagacatcttcataattgttgtaactcatagcataattctttacattaaaaaaattattacatgcagaaatagttatcttcattctccctggctatataactcaagaattcataaggacaaaaacagctgaaatgtctgggattaagtctctgtaacatattttatgtggactagttttccttagtgctgtaccttactatcttttgatagtacaactacagcattttgagtgtattttcatgaaaagctacattttaaaaaaaagtattatatttttaaaaatttagagtatttcagagaaaaaagattaaagtttttctatgtattataaaattttatattgctttaaaaatgttttaaattatgttaaaatgtaaattgaggatgtgggtcacttttgagccttctccagaaaaattatttgcaaataaaaccatttaagaataattttttttttaagcctggcacagtgtctcacatctgtaatcacagcactttgggaggctgaggtgggcagatcactcgagccaaggagttctagacagcctgggcaacatgacgaaatcccctctctacaaaaaatacaaaaatttaccaggcacggtagctcacgccttgtagtcccagctacttgtgaggctaaagtgggaggatctcttgagcatggggaggctgaggctgcagtgagccgtgataacatcactgcactccagcctgcacaacagagtgagactctgtcaaataaataaataaatatataaatatttaaaggatcctctattgttgtgaatacttttaaaggctttctggatagtctaataagaggtttatattttgttccactgctaggattattgcttaggagctttcctataagtttcagaggtgttatcctatgaattcaattactttatatcagctctgataatatgcagggaatgttgaagatgaatctattttgtcctgtagcctcttgtttctcatacagacgtctctgttggacttcaaaatctggcaacagagtaatattgttaattaagcatctaaactagattttacataagacaaacactttaaagcaaacctactagtttgttaccaaaaaactgagaggtaagcatttctgacaaatgtaataacactaaccttgaccacaaaaaccataaagaagtctccactctattcaatttttagtataaaaagtgaccggaagccgtgtgtttgcccccacacaaatagaaacagatgacatattaccccttttttcattgagcattaggagtaatattttattatgatagtttttttgttatataaattgaaatttgggtcaattgtaagctctttttccatataaggtgaaaagtgttcaatcttaaagtaatagaagtcaaattattactgataaaaaatatgttcagaaaactgaagagaatttgttgcacaaatattttaacctttcactgtttcaatgatgaaaattgattaaatggactagggacacttttatttatttatattatgttcattctttaaagttttttattacaggaaatttcagacaaccaaggaaagagtattaaaatgaaccttcatatctcagcatgcagcttgaatatatatcactgttttgctaatcttgttttgtgtattctttcatacatactgtattcattgctgggtatttaaagcataaccaggtatcacatttctttatctaaaaatgtttcagtatgcatctctaacagataaaaaatatttttaataacactgtgcttttatcacataacaataattctataataccattttatacctagaacatatttaaatttctctagtgatcttaaaaatgtcttttcagggttggtttgtgtgaatcaggatccaaacaggtctatatgatatattggattatgcctcttaagtatcttttattctgtaacaatcctctctaccttctctttttaaatgtcattgatttctagagaaattgggtcatttatcacagagaatgtccgtattctatattatagaatatggaactggttgcttccattctgtattttctgagctggctcctcctatcccctgtatttcctacgaagatgtaattagatctagaggctgtattagatttgaatttgcgggaagggggaatgtagtactttacaggtggtactatgtatttcctaatgactcacaaaaagaggtgcataatggctgcctgtcccatttagtgatcctaagactgatgtgtttaggtggtctcagcctggtctctcacaataaaattctccatcaaattttcacctaatggttttagcatcttttgataataattgcccagatctattattttattcaggagttataaacagcaattttctcattctattattctttctccctattttagccaatgataaagaataaatttctctcatctgctttttaattttccatatatattggttttattaggttggtacaaaagttattgcagtttttgccgttactttcaataagaaaggcagggtaaattttcattgttatgagttgatgctctgattatttccaaagatgactagtgacagtgtttgttggttgggttttagggccaataagaatgcattgatttttatatatttaatgggtttttatcaatatatcacttatgtatgccttatgattctttcagtctagcttaaatatgctcgattatttactttggttaactataatactgaaaacttcttaaagtcaagctatgccttattctttggttattcatatcaaaataatttacattaggtagataggcactaaatatttgtgccacagaattgaatagacttcactctgtgtagaatatttaggctggaagaggatgtgagagattgtttaatctaagtcctgtcatcaggaaagtagctattgaagtcatttagggcagataaaataggtcactgtgcatctcaaagaacctagggataaagattccacaactccaagaaggctattccaattatttttaaaactcttacctcatattgtagatcaatatgttctttttattaattccttttctcttctagtattctagtggaaatgaaaaaacattcctcgtacatatttccttttccgtatttctttaagccaagagatttgtgtgcttctgcttttattacttcaaaaatgaacttttgttccaagttaaatgttattttttggttgtttaaattggttatttatagtcttccgtgacttatttgcattaattgctcctaattgattaagcagccatacattaatttcctgcagctgctaaaacaaattactacaaatttggtggcttcaaacattacagatttattatcttgcagttgtaggtcagaaatccaacatgggtctcactgagctaaaatcaaggtgtgggcagggctgcattcctttctggaggctctgaggggagaatctggttttatgtcttttccagcttttagaggctactgcatttctcttccactcaaggtcaacaacagtgggtcaagcccttatcacatcacgtcacgtcacatcaccatcaccatcaccatcgccatcgccatcgccatcaccatcaccatcaccatcaccatcaccatcgcatcacatcaccctggccccctttcttgctttcctcttctacttttaagggcccttgtgattgtagtaagctcatctggataatccaggatactttccctattttaaaatcagctgattagcaattgtaattccaccttcaacctcaattctcctttgtcacgcaacctcacatcttcacaggttctggggattaggatgtaagcaagctttgttgggggcattatcctctctgccacaagctgtatgtttaaaatttgcatctctattcaatcccctttctgatatcagtttactggatgtatttttcacagatatgctgtggtggtttagtgtatttgtaactataaagtgatgaattaaagtcccttgagtacaaagtgctatacaagagcaaagaatttttatttcttcatggaaaaaaagcatcacttacagctcctgctcttactttcttttgtaataaggtagtggtatgtttttcagttgcatggaactatacccaaacacagtgaattaccctcagttgcgaagcaaatattaagtacagccttgtctgacacatgtcatttgtttaatgatatgtttaccatcatttttcattttaccattgaattgagaagctgttgattattcagaaatattcaagctaacctttagtgacctgtggaccaggacttccactaaataatcatttataaccatttttacatttaatacctatctattatctttctatttattaagtattgacagagatgttttcaagtcacttactgcttttccatgcaaaagtaaataaaaccttccttttgccattttggaaattaatattcatatgaaatttctgtaaaaatttaagattgtactagaggggcagtaggaaaaacagtattttccccagtggctattaataaatattaattgcctccagagccctgcgatgacgtgataaaacatgattcacatttcatagatcctctaagttcctatgtcttttttttttttactcacatcatgaatgttctcactcctggttaacattttaagtttctgcttctttcttttatggtcagctgctagtaattttgctaatgtctcattagctgagaactttctcagcgttgacctttaaagactcatacttaatgatgttctgttgacatccgaaaacactttaatcagtgtcacctgcagaggaagacctacagccacagttatgtggtgcacgttgaagaattgctttagtatccttactgcagaaaaggcttaagtttaaaaatatgtgttcactatgacaaattctgattgaagagtttgtcttccaaccaggtgttaggactccaatggggtgcaaatgttttaattctcgtgttctcacagctgctaaccctcacactcatttctctaagggagtgcatttctcacactcagcacaggcctctcagtcactatcttgcctataactccttcaagtgatgccagctctagtgaggaaaaggatgcagtgccaatgcactggaaatgctctaagctgaaaaaagtcctggacaaggatgctaaaatctgtgttctaggaaagatcagtcttcacttgagaggcagcatgatgtgaggaaagaatacctgtttacttttgagtcagacagacctgggttcaaattcaacacgacttattgtggaatagttgtgggtaagtagtttaaattatctgaattatatttttctcatttataaaatagagaataatctttcagaagcattgtaaagactatggctgaatcatataaagaagctaatataggctgggtgtggtggctcatgcctgtaatcccagcactttgagatgccgaggcaggtggatcacgaggtcaggagttcaagaccagcctgtccaagatagtaaaaccctgtcattactaaaaatgcaaaaattagccgggcatgggggcgggtgcctgtaatcccagctactcaggaagctgaggcagagaattgcttgaacctgggagggggaggttgcagtgagccaagatcacgccaatgcactccagcctgggcgtcagagcaagactccatcttaaaaaaataaaaaatttaaaaaaaagaagctaatatagactctagcacagagtaggcatgttttataaattttgtcagttgctgttataacaagcagagtggccttggaaaatttacctaacacttctgagctttgtctcaattgctaataactattgggttaactttccactaaagttctggccagctctaagaggttagtgcctaggttgaaaaagcctggtctaagtggcagttttgtggtttttgttttatatttgtgggtgcggagatagtgttggtaaaattgtagaggatagattgttttagcagagctgttagtcactgaaaggcagccatgcccatctatcatacccaagtatgtttctcgtcagggtcaactctcaaaacaacattaaaaaacaaaataagcaaaatctaagatgatggcacagtagctgatgcatacacacagctctctcccaaagtcattattatctcttaattatcaagggtatcctgtgtcaaagctgactgtttcgtgcctttggtgaagagagtcatcaggtgcctcttagaattccttagctgtggcctccaaagaaaaatatggtgactccctcaaaaatatatacctggaaaagtctgtcatctctagatctcactttttcaatcgcttattcaaataaagcaatttttagcaagaagatagcgagaattttgacctgtcctactaaacagataaaaataagtgcatgacgctttaatttacttaaatgatggcaattctatctcagcgcatttgggctaaaattcaaccatcagtttcttactttgaagtttctcactttatttcacagtgaaacattttcaaaaatttaaaagcaaagttgatttacgattgatcagatatgagtcagtataaattgtatgcttataaattttaatgcaatttatatttctacagattattagtaccatttacaaggtttacccttaatctttatattggtatagacggcaagaggaaatgcacaatttttcctattttaccatggcaacccttagaatttcagttgttctcttcttctctatcataaaagtgtttaataatgctctatttttatgaaagtgggatgaaatataaaataatagagattgatactgtttattacactgaaatataactatcataagtgattatgcattcattgaagaaaaacagaaataggggttgaaaataactgaaggaactatatagggaatataaagaagatgaaaaaaataacttatgaaaaaaagaaacaggataaaccaatagaaggaaatgatgtagtaccagccattgaagccagctgagccctctcttcctggcagagtccttagagagacggcaagaggcttcaaaggcagggagcaagacagctgccaggggtgaatatcagactcgatacggatgcaagatggcagttatgcagggataggtagtactgttagttctcttttacccagaaggaggttgaagctccaagagttttaaacttcctaacactgctcacctactgtatggcaggtaaaggatttgaagctaggaagtctgagctctgaaccactgtgttctactgcctctcagaacttagggaactttatctgttctacaggacaaaggtgttgcttctataatgtcctgtaaaaaatggttaaaaagtgggtggggagatgtattatggctatctcctcattaaggtttaagtatgtaaggcactcatttcatcctcaaaacttgttctccccttcctccaccaccaccatctctgcttgttatgtgctgcccatccatcaagtcctactttatctactgtacacaaggccatttctggccaggatagacatttcagtccctctccatgaatatcctggaggcttaccatttgctttatcattcttaaggttaatcaattgctatttgtttttatttttgtgtgtcttgtctgcctctacacttcacccaaggagaaaactcccagcagctaaggaccccaggaaccttagatttctttttaccctcaatgttttcattgatttcagaaacacaataaaggaatagatgagtggacgggtggatgggtggacgggtggacaggtggacgggtggatgggtggatgggtggatgggtggacgggtggatgaataggtgggaaagaggaaaaggaaaggcccaaaaagtctgaaacagctgtgggtacgatttaagatagatttttctcttttaaaattattttcaaaatgtcatctaattcttagttatttctttggaaatagatttaccacttgggaagtatttggctttaaatcttcaagatgagtccaaagttatcattttaaaaaaacaggaatcccagaatcatttgatttttttttcctccaaggcgcaaaatttaccagaacttcagcttcaaaggggatttttaaagaaattcgcctaataggtatcaatttcttaataaatgtacaccatctcttaaacaattcaccataagtttataccagaaagccattgtatgataagagatgaccatttcatcatgttttggtaaagaaaacatcccttcaaagtcctgtttttttctactggattcaactacaatgttttcatggtctgcttgacttcaaatgataaactgtcaccaagtctatcttttcttggaagtacaatacaaaaattcacaatattttactataaagcacagttttttcaaatgtaacccacaatgcactgagatcaaaatctaacttttaaaaagtcattctcgataatatccaaaagagtgtccccgaatggctaatggccctttttgtcatgggccaaaaagatatatggtcccaggttcattgcaaaagtcttgctatggagaaggggtcttaagtggaaagacagctgccagtaaaaggatattaaagggttatctggaatagatatataagatagcatttaaactttagaattttttttttttacatttcaaaaccaaggaacatggtcacatcaactttcctgattatccatatattattttcctttaaatattttacattccatggaaattcagtgctctctgacacatgtgggtcataccaagtgctatgccatgaaagccagcattaggttatactcttctgtattgttccccaattgtttttgtcgtgtgtgtgtttcttctgtgtcatgtctcaccagcaaaatagtaagctcctgaggaccagagctgagtctcaccttccctgatgggctccacaatcagggtcaatatattcacagctgtaatagctgactacccagagtttgctagggaaggctccctgcctagttgcctatagtaaaaatatccaggagaaaaaattattcaactggggtaaagggttgactctaccctattagtaaagtaactatataccctgttttatctggcatagagtcatggttgacacctgctgttctgatataattaattgtgctccctttcaacagtaccctagtttagttgaaaaatctatatgcaatctacatacaggagaaagcctagaattcttagcatggtccccagatgtttcacaatctgatcccaaggtaatagcccagccttttctctgccactggagatgctttgcatcaagaaaagggagacaaaatcaagggttggagggtttgccacaggtttgccactgctgtgttccattctccaggctgggcacatagatggtcaaatgctggagtggcacttcttatcaaccagttagctgatgatttaatatttttgagcacttacaatgtgctgggctaagggctttatggaaatgggttattaaatccttagagcaaccccatgaagcaggtactattagcattctctttgccccactgaagacagtgagtccccaagaggttaagaaatctacaagtagcaggctgactcctcagcctgtatagctgaacaccatgccaacgtgcttttctccgtggcctataagtgttccagtacttttgaactcaatgttaaaaactcatcttgtgtaaattattcctgactccccactcctacatggaaaagctgacaagaacatttgaaaaggaagaaaaacctttgctgatttgacggctttgactttggatactatctgagagctaatgtgacctggctttataatttgaaagacaaatatccgaacaaagtcctgataaataaaaatatccagacacacttcctgtagcgataacatgaacaaagtggtgaattcactggaaaaatgtgtgtgtgcgagtgtacagtctctgcttcaaaatcaagcccttgccaaggcttaaaccagttaacagacaacactctgaacttctctgtggggtgcacatataaaacacgggcaaggaaaaaactacatgcaataaagccaacaattttaatgcctaacaggtctgctaaactaggaaaggatgtggcaagtgggtaagataaatagtttttaaacatttgtggtatcagggagagaatctgccagagcattcgagtgaagcagggttagtttgggacagtagctgaaggagatgctcccaactctatgccaggagcacaggaaatgaaatgacctggaaccccagcgttgtggtcagtgtgcaggcactggaagtggaagggtcagggctggcttcaagatcggatgaccagtgcacttaaaggaccttgcattctgggtttaatgccctgctgtcagtgtcatgaattcttaacttatctttccgttttattttgtaagtgaggtcctatcagacaacagagcaggcgcagagtcttggagcctgggttcttatgcttggcctcccagcccctcccctagtttgattctcaactgtcatgtcctcctgccctggtgtccctgctgcttggctgccttctacttcccatccctattcagcgacttcagctgccctccacctccagcagggacttgggtgtgcacacctccataatgacatctggccgggcatggcggcagcagtcctcgcagtgtctggcagagccactgtgcattaagtagggcatttggttggggcaagtctccctctcacctgcatcaggtacacagtatgtcccagtgcagaaatggcaatcccttggaggtctatgaattgggatggcagacctgcagggaagggagattgacttttctaccctggggggtgggttgggggataagagtaaagcactttgatcttgatcctggaactgctgctggagggagatagtaagtggagggggaagagagtgggctgagggtctgcacccacctgtacagtgcaatattaaatagcaaataaacattatgatgggtcaagacagagatggtggaagaaagtaaaagttgaattttgtgccttcaatggcactctttttagggtcctaccttttgattttgcatccgaccctgcaaattatgtagtcagccgtgggtgaaatgcatgcttttaatagcattgcctccccaactctcacagaatgagagtaaaactgagaaaaactccaataatgtcttcctcaaaggactgtctttaaaatgaccctctgtttagaaaaagtgtgtcttttcttccagacaaccttagaaacctgtaaatggtgatcaattatggcagagccattgggagtacacattactggaaggagatgccctctttcccccctttaacgttgtcttcctcccatacccctttccccacatcctctcttccaatcaatgctgcactcccatttcatatgtagaggctccactcactctctatagcgggccaatgaggggctgcttctcactgctgttattcaattccaaacaattctgagcaacttctcttgtgacatccgcaccaacatgagctgtgagctcccttcagaacaggcctgtgaacattctggaatcccagcagtggctgctgttcctagtcatttttgcattgttgttctgtggtacggctggctgcacttttgtgagtagtttaacctttagtatgagctcagcctgccaggggcctgttccgcagactgcatcttaaagactgagataagccagaattctccaagccatggggcataacagagtgttctgtcaaactgggtgtgggttcattattcaacagatcttgtaatgtttaaaggaaataattactgaatagtgtaggatttgctttaaaatttgctctccagttatttttcaggcaaagaaggaaaagttttttttttccacatgaaaacatactttttctgaggaaaaaaacaacagtcctacaaataggacttattaaagactaattgtttgattacttttcaaaaaatacttgtttgtgctgattgtgctatttcccaaccctctaattattttttttcctttctgcctgcaaagcctcgggcttcattcatctttcttctagccccaggcattaaaggggtagaagagcagattcattaattctttcagaacatgtttattgagcaattactatgtttccatgtttagaggtacatgaataaacagcatgaactgaaagcctggcccatgtccagagtaatcctcagcctcttatagctttcttcaggggcttaggaatactctaaaaggtggaggacttatattactttgtgatgctccataattctatagacattcttttttatgtttaagggcaatgtgctagtaatctactgagtgatgtattaaaaattagcattgtatattagtcaattatattgtatgtattaacatagtaaagttgacattacttatgctacttatgctactctattcttatgctactctattctacttgagcttcaagctaccatgaaattttgcaaagctacaacttagcacatgcccaagcagacagcaggatttccccaattttctagaaaaataaccatcagtgtttttccagaagtgacgccatccttcctgaaagaatgttagtgatgttcttgagttggtccagactttcagttgctgctgttctggccttttcatatgtaattacttcagggtcacttaattatcatggatgggcaggttttctgtagtcgttattgattctgtcctgtggagtgatggcatcaacaatattggagcctgtcttttttcagcaatggtcttcagggtggatgtggactacagttgagttatgaatcattttataccccattgctgaaaccagtttgctgttgtggtgtaaatttggttttattagtcagttctttgtcaccggaataggacaatgggtggggtgggtggagtgcaaagttggtccccctgttgaaacttagaactactggtaagtagcctttcaataagtgaggagacaacagcattctactctttttacattccagctccccacaggcctgcccgcctctgcctagactgacttcttcagtggggttcccctctcccttctccccttcatctaccaataggccacaggggacccatctacagcagaggcaaaggcagctgatagctacagagtcacagagcccagggcgctggtgagctgtttatatacctgttccatggccacacttaggaggtccgttttttgagaaccaactagtgggtgagtggaactccctgctggagcttaaagacagcaatatttctcaagggtgtttttcaggtatacgttactcaggcttagtgttgatgaaatgcggtacaggagctgtggccaaatgtcaagagctagaggatgcttaaatttagattatacccgctcaggtctgaatatagctaaatgtggcttgtgagcacttacagatgcaaatcagaatcgacaatatttctgttatggagatttccatgaatatagtttttttttaattctgtgggtgattttattcttgttagggtctcatgatgtgccacactggcttctaataaaaataattaccttatttcatcaaattctaaagcattttctactgcaaatcagtctattttatataaaactaagaaacaagttgctaattaatggtactgctcttgtatcccttgaggtttttgttttatacttatggaaagagcttcctttgactcattgatgcatacattttatgttgtctgttttttttttttttttttttttttttttacaaaagagaggatttccttttctataaactgttttagacgcgttttagattaatgaagttgtgaagttaggtctcctgaagcctgagccgacggcagcacgaagggtaagagcaggtgttcttgggctttgtgttgaccagcttgccttacacaaccccagcactgtctgggacacggaaggtgttcttcttaaggaagtaaaagatgaaggcaagaatagcattactgattcccaaatggatgatgttgaagttgtttatacaattgacattcagaaatatattccatgctttttttagcttttataattcctcaagtgaagtaaatgagcaagcactgaagaaaatattctccaatgtcaaaaagaatgtgataggttggtacaaattctgtcgtcattcagatcagatcatgacgtttagagagaggctgcttcacaaaaacttgcaggagcatttttcaaaccaagaacttatttttctgctattaacaccaagtataataacagaaagctacgctactcatcgactgaaacatgccttgaaacctcaaagaggactttttcacagggtacctttagtggttgccaatctggatatttctgaacaactaggttataaaactgtatcaggttcctctacatccactggttttagccaagcagtaaaaacacacagctctaaattttttgaagaagatggatcagtaaaggaggtacataagataaaatatgtaatgcttcattacaagaggaattaaggagtatatgcaaaaaaaagtgaaaaacaatgaacaagcaataaataaactagtaaaggatataaacagattaaaacaagaaattggaaaaaaggagatgagcatagattcaggcagcctgagagaagaatatctaaaaagaccctcaggggaacatttttcctggtcaagcattatggaccttttatccagattctgaatttcttcattcgtgtgttgtgtctttaaaaaacagacatgtttctaaaagctgtaacaacaacctccacctcgatgtagtagccaaactgaccttaatggtagaacacactgacattcctgaagctagtccagctagtagaccacaaatgattaagcataaagccttagacttagatgacagatgacaattcaagaaatcacagcagttagagacataagacaaaccatgtaaaacagatactgatagtagtaaccaagaaaaagcatctacaatgagcagcccagaaatagatgaagagtttgagaaaatgaagggatctagtgaatatccagtctcctacatcttgatccttttaacctaaaaggagatttttttttcatttggcggatgggtaaagcccaaacatttctattctattgtttttactatgttgagctacttgcactaatacagataaattcatttgtttttactatattcccctgtttgcagtaatccacagataagtcttagcatgtttaatttgtaaagtatgttttcaaacatcagatgcttttatttcaaaatcttttttcacatttcactaagttgttgagggaaagccttacactgacacattctttataactggaaaagtgaggccgggcacagtggctcacacctgtaattccagcacttagggaggacaaggcaggagaatttattgaggccaggagttagagaccaacctgggcagcatagtgagacccatctctattttttttttaaaaaaaaaggaaaagcaagaataggaaagaaatagaatttattttcacaatgtagaaagaaatttgtatgaaaatttactttttatcgaagtcattaaaattctcctaaactgataattttttttttaccttttttaaattatactttcagttctggggtacatgtgcagaatatgcaggtttgttacataggtatacaagtgccatggtggtttgctgcattcatcaacccatcatctacattaggtatttttcctaatgtcatccctcctcctgcccccgacttcccaacaggcctcagtgtgtgatgttcccctccctgtgtccatgtgttctcattgttcacctcccactaatgagtgagaacatgtggcgtttggttttctgttcctgtgttagtttgttgagaatgatggtttccagcttcatccatgtccccgcaaaggacatgaactcatccttttttatggctgcatagtgtatatgtgccacattttctttatccactctatcattgatgggcatttgggttgcttccaagtctttgctattgtgaacagtgctgcaataaacatacatgtgcatgtgtctttatagtagaatgatttataattcttttgggcatatacccagtaaagggattgctgggtcaaatggtatttctagttctagatccttgaggaattgccacactgtcttccacagtggttgaactaatttacactcccaccaacagtgtaaaagtgttcctatttctccacatcctctcagcatctgttgtttcctgactttttaatgattggcgttctacctggaatgagatggtatctgattgtggttttgatttgcatttctctaatgaccagtgatgataagcattttttcatatgtttgttggctgcataaatgtcttcttttgagaagtgtctgttcatgtccttcgcccactttttgatggggatgtttgttttttttttcttgtaaatttgtttaagttctttgtagattctggatattaaccctttgtcagatggatagatcacaaaaactttctcccattctgtaggtgcctgttcactctgatggtagtttcttttgctgtgcagaagaagctctttagtttaatcagatcccatttgactattttggctttttttttttgccattgcttttggtgttttagtcatgaagtctttgcccatgcctatgtcctgaatggtattgcctcggttttcttctagggtttttatggttttgggtcttacgtttcagtctttaatccatcttgagttaatttttgtataaggtgtaaggaagggatgcagtttcagctttctgcatatggctagccagttttcccaacaccatttgttaagtagtgaatcctttctccatttgcttgtttttgtcaggtttgtcaaacatcagatggttgtagatgcgtgctgttatttctgaggcctctgttctgtttcattggtctatgtatctgttttggtaccagtaccatgctgttttggttaatgtagccttgtggtatagtttgaagtcaggtagtgtgatgcctccagttttgttatttttgcttaggattgtcttggctatgcaggctcttttttgattccatatgaaattgaaagtagttttttccaattccgtgaagaaagtcaatggtagtttgatcaggatggcattgaacctataaattactttgagcagtatggccattttcacaatattgattcttcctatccatgagcatggaatgtttttccatttgtttgtgtcctctcctatttccttgagcagtggtttgtagttctccttgaagaggtccttcacatcccttgtaagtttgattcctaggtattttattctctttgtagcaattgtgaatgggagttcactcatgatttggctctctgtttgtctgttattggtgtataagaacgcttgtgatttttgcacattgattttgtatcctgagactttgctgaagttgcttatcagcttaaggagattttgggctgagattatggggtttgtagttcttcttgaagaagcccttcacatcccttgtaagttggattcctaggtattttattctctttgtagcagttgtgaatgggagttcactcattatttggcttgctgtttgtctgttattggtgtataggaataatgggaaattcaactcagttatcaacagtcccgttgtttttttacccagtatcattgttggtgccagcaagggtctggcatgtttagtaaaggaggatcatacatttgatttagatgttttaagatatattttataagaaagtattccactgaattcttatttattcagagttagcatttctttcaaatgacttttcagcacctgtggaaataggcttacttttttttcttttttcttttttttttttttagacagagtctttgctctgtcacccaggctgcagtgcagtggcacgatctcggctcactgcaacttctgcctcccaggttcacaccattctcctgcctcagcctcccgagtagttgggacaacaggcacccaccaccacgcccggctaattttttgtattttttagtagagatggggtttcactgtgttagccaggatggtctcgatctcctgacctcatgatctgcccgcctaggcctcccaaagtgctgggattacaggcgtgagctaccactcccggccttttctttccctttatgttacattcctgggataaactgtatgtggtaataatttattattgtattatgtgctgtcagatccagattctgcctgtcagtatatttttagggtttttttgcatcgatatttatgaatgagtttggtttgtaatgtttattgtgaaatgcttgcattttggaacttgtgatgcttgctgtaaagattttttgaacattttcctctcttgtaatatgtccttagactttgtagaacacaaactctgctttctagaaatcaccattgttactaatacttaattcatacttcttgtgttgacattgttacagcttttattccccccccaaaacaaggtctcactgtcacccaggctgaagtacagtggtgcaatctcagctcactgcaacctgtgcctcatgggctcaagcaatcttcccacctcagcctcctgagtagctgggactacaggtgcccatcacaatgcatggataatttttgtcttttttgtagagatggggtttcactgtgttgcccaggctagtctcaaactcctgagctcaagtgatctccctaccttggcctcccaaagtgctgggattacaggctgagccaccatgcctggcctttgttacaactttaattacctttaagaaccttttgagactaggtatgatttttcctactttgcaggaaactgaggtacacagaggttaagtactttgacttgtactagcatgtagttgcataggatttaatctgtttccagagtctgtgctcttatgtccagaaaattagtttaacaaaaaaattgttaaacatagcaagggcctttttcaggcccccttacctaatttcttttaggattatcttggtttatttcatgcttcttttgtggacactttaatagcagaaactttgcatgcagaactaagcttccctgtgacaatattctgaagcagtgaggcttgcaatgcaggcgtcctctaatgggagcagacccaaaatgtgaaaattgggatttatcaaactgcaattataagagtattactgaaaaatccagtaattaacaaaatatttcaacagtagatttccttaagcagtaaactgtccctgtcctccacaatagggcattcaaaatattaagcaaattagatttaattagtctgcaacattgtatagaattaactattaggaatggaaactttgttaaggtaactgcattctatgcaacttttcctaaattgacattttaggtatatatctttctaaatgaagtaacatatattggcagaatttcagtctacaatgtatatatttccaggctactataaatccacaaagaatttattgtacagaacagaaatagaaatcctactcttgagtcttatttttccacacctgtgtccccaatagagcacaaatactcccaaaatatgtgtatgttggaaatatttaatgagcagtaagagccaacacatgcacccaggtaatgacatttgttccaatttgtaattggctgtaacagcctatgctttatgcaaaataactgtgatcataacaaaaggtatttttaaattgctcatataaccatatgtcttggatcatggtactatctttggcttctgtatatgttatttttctagtgtttcgggtctttctttaaaaacctctaggcattaggcataattaatccatatgaaggaagaatctaaaaggttaactctaagagactctgctagagtgagaacaatttaggaaaactaggggttttgttttctaaaagtgaattcctgagatttattaaaagagtattttgtagacttgattaagatagttacataacttgcagggccaagaacaaaatgaaaatgcaggtcccctggttcaaaaacatggaaaaaaaatgttgttgaagatactaaaatataaagctttttcctttttgtggtttctccttttgtcatgattttatttatttattttatttactatttgatgtcttagtaaagaaaaaatttaaaattattagcatgaagtttactttatatctttatattgttcaatcccaggtttaaatgcaaacgtaagggcctttaattcctaagtgaaattactgaaattgcacaatttgtattttacagtttatacatatatgcatatgcattttgttcctaccagaatagtggaaatgctgcacaaaactaattcagctgtttatttcacttcttaatatgtgcacattctaccaacactcttctttcaactcatttctgaatgaggaagagttggaaaaaaaaaaagaactaagagtgcccttatctttcccttttttcctttatcattttcagcataagtggttggctaatacatgagtaagaaaggatatgatagggtttcttggtcattcgtatttcttttttttattattatactttaagttttagggtacctgtgcacaacatgcaggttagttacatatgtatacatgtgcaatgttggtgtgctgcacccagtaactcgtcatttagcattaggtatatctccgaatgctatccttcccccataccccaccccaacaacaggccccggtgtgtgatgttccccttcctgtgtgcatgtgttctcattgttcaattcccacctatgagtgagaacatgcggtgtttggttttttgtccttgcgatagtttgctgagaatgatggtttccagcttcatccatgtccctacaaaggacatgaactcatcattttttatggctgcatagtattccatggtgtatatgtgctacattttcttaatccagtctatcattgttggacatttgggttggtgccaagtctttgctattgtgaatagtgccgcaataaacatacatgtgcatgtgtctttatagcagcatgatttataatcctttgggtatatacccagtaatgggatggctggatcaaatggtatttctagttctagatccctgaggaatcaccagactgacttccataatggttgaactagtttacagtcccaccaacagtgtaaaagtgttcctatttctccacatcctctccagcacctgttgtttcctgactttttaatgattgccattgtaactggtgtgagatggtatctcattgtggttttgatttgcatttctctgatggccagcgatgatattcatatttcttaaagtgccattgccttttttctgcatctaaagcaagttctggttcacatggaaagtacggtctctcacagctctgtgtgtccccctccttacccttttattgaatggtaaatgtgacatacttaccttgttctacctttgagtcttgctgaactcccacacatcatggttcctttggaattatatgataatgcattcctccaatgccataaatgagtgggggaggcaagaacatgctgacatgcttattgcttctgtttcccccactcacatgcatgctctattgtcccatcagacttcccttgcaaaacacaagttcaaagataaaagtgttaagaatttcaagatggtgacagcaggaccttaaaccaagcatagggcttttctaagcatggggccccatgtgactgtatatgccacatgcccatgaagtcaaccctgccccagttatctcatctacaaattgaggtgataatagtagtgccaggtaggattgccatgagggagtaatgaagttatgaatataaggttctcaatatagtatccagcacatagaaagcgttcagtacatggtagtttattgctctatatctcaaagaaaatcaggaaatggttattgtattcctactaggaaacttgttgatttgatttgggtccagcattccttgtacgagcctcactaagcaagatgtgctttcaaacacacgagactggaacagaatgaatgctcctttatctgtgtggtgggcaggaggcaactgtacaatgatgaggcaaagctctgaggtgagttcatcaggctgcctaagttactttattcggcggtaattactgcagcaggttatagccaatagtgctgtgtaagatgtccagaaaaagacaaaggcacaagttactaagagaagttgagttgccaggttgtccccatctgaaaagaggtcagctctgcaaagccttgggcaagaaggcctctgctccagactcatggaggggagacatttgaacccagaatgaaaacaaaacaaagatatgaagtctgcctgagtaagtagctgtgaattctggctgactacagcatccaaatgatatttcttatagaacgagtttcagagtttaaagttctggaggaacattgtaaagaatactcatcaatccattaatccagtagagttgcttataaaatgctatttcatatgcccaaaatatatttggtttatttacatatgtgtaaccagccattcatcttgcagacatcaatatttaaaaaattatttgataaattattagctccttattgagttagcatatgctgattgatttaatataattttatttaaaacttaaatatcctgagattccctatgtacatttcattgaaatatatttaaaatgaaaattataccaacttataaattgtgactgtttagaaattgttcattaaaaatgactagctatgaaaacaggctgagaaattacataaacaggatacaaattaggaagggcgttataaatattcctgttcccatgaaagggagtgattttagctcatacaggtgaggcccacggtgtcttgtgcaagtagaatttttccttccctggagcatcgggattggctctccttgaggcatggggtaacagaatggacatactctgattttttaaaatatatatttgcagagaaaagaactgatgaagacagcgtttaaaatctgtgtatagtatgattattttaagacttctccctcacccttgcccatttggtttggaaaatctggatttaattttcattttaatgacttaataaacttctcaggaagtgtcaacttttcggattattgggtcctctcactccctggagctgcggttatggaggatgactcagggaatgctgaatcagggtaggggtgtgctgcctccaatgctggttctcaaagggtttttctgataaataatgttattgcttccagatgcagagccgaaatatctgatagttgtgcgacctgctccacctccaagtcaaaagaagtcatgttcaggtatagtcctttgcattgaattctttttcttttatgaactttgaaccatgacttttcatctcttttggacccctggagaccaaatgccttgagaagctttaagaatgtagaggaggtgtcagccctgggtccacagtttacccttttggagaagtaacacagcctggtggtagagactgcttgggattttctcctggtgccaccacttgcaaactgcagggaattacataagttattgaacctctctactcctggattctgctgcataatagggttgtccttgaggattaaatgagttaaggacagtgcctggcctgtagtcagtgctcatttggggttagctcctattagcctgtttctattttacagtgtgtgaactcatgctcactattgtgcctttcagatgttaagggcaaaattttatgtctcaccttttcttaaggagactgtttacattttaaaaggataattcatgtatgtgtgttaaatagatcagcatgtaggttttatttactccttatctctcccttctaacctcttcaattcaataaaggaaggatttcttccataaaataaaaataatagcaacactcatgtttccaggtctaggaagacttgcaacaggaaagtggatatataaataagtaagtagaaactttctacataactaaagattaaaattctatgtcgtctaatttcactaccaaaacttcttctcagatcaaataatatagctgaccattgctataaggaagaagctgtgaatatgctttttctatctgatgttgcatcttcctaactctatatagagttgatcacaaaattttgcttttcttttttttttttttctttgagacggagtcttgctctgtggcccagactggagcgcagtggtgcaatctcagctcactgcaagctccgcctcccaggttcacgccattctcctgcctcagcctctcgagtagctgggactacaggcgcccaccaccaggcccggctaattttttgtattttttagtagagacggggtttcaccgtgttagccaggacagtctcgacctcctgacctcatgatccacccccacctcgctctcccaaagtgctgggattacaggtgtgagccactgcacccagcctgcttttatttttctaatgtgaatgatctccaagtaattattgccaaagcatgttcatcttttatggtacactggataccacacgataaaaggatctttttgtttgtttgctatatttttctggaggaataaaatgggagaaagaacagtcagctattcagttatactaaatagcttaaatcagaaattagttgccacaattccctcccctctttctgctgatttccacttcttttaagagcagcattgaatggttaagcattttgaaaaatactaattctttttcctggcctcatagatcatcccaaagcaaaagggaaattccaatcgctccttacaacttgttagtgagagttgtccagacagttttccacacacttgaaaatagatgtactctcaatatttcaagactgtacttcaaaaatattgagccacaaactcaagaaacatcagtgtgattccatggaatctgttttcagatgaatactcattgaactgtttcttgatagaaatatgatcatagtacaaatatacaaaattatgtaaggaatgtcaagagaatgatcatgccttagcactttataacttcattttattttgaggattctatgacactagccttagaaattattgtttactttatgaccagctcaggaaattgcttcatcttgctcaggatataacatcccacctttctttttggatagcggatataattttgtttttgttatctgcatttaggaataatgtaatgactaagggattagcttccattcattctatatttgtatctgccacataaattttaattatttaattatttttatattaagattcaaccttagtgaaatagttatttggtcatacaaataattgggagaccattagtttcccttggtcatacaagccttaggttccttacatgaaaaatatgtctttcatctctaaatggcattatttttatacatagagagccaagacagtgatatcataaaaataaaactagattgtgattgaggagacccaggacttgagttttgactttgctcttaatgtgactttggacaatcttgaaacttctctgtgccttatttttcatctgcaaagtgaatgagatcgttgcatcacgttagtgaaaatcaactcaggaattgaaaagggaagatcacaatcatcccagggcttgttcaaactataagtgttccctgccttcactgcagattctaatctgccctcattggagctcatacatgacaatttaaatcaccatcatataaggcacaattacagctgggtctgcagaagttagagaagaataaacccgtgtttccaaccatgtaaatgataactatctttgaaacttatttcaaacatctttaaaagtcaactatcctataatgaggcaatttgccaccactaggttaggtgtattctgtgctaagaagggttcttgcttgaataacaacttacagaacttaaatttaacaaaaggaacaagcttgacacaattttcaagagcatttgattcagatgaccaccaataggctcatgcaaggggcactctcctacctaccttaatagaggtggcaggccattctgccatttggctcccacttcattagacagcacaagttctttctagagcaaatacaacattcatagtctcaagaaataaaagagggaattcaacagcaatacagagtatgtatgttttatattctgtgtagttttattaggctttctatcggatttttatcttatttactctaattattttcaatgagtcagcattggttttcatggttgaggttcttcctgtttttcgctgccctacttctgcagtttcagataattttgaaagtgcaagtgcctgcttctgtgtacttgaacacaatctccagtgatttattagcataactcttggcattatttagatccagttggcaccatcagaacaactgtgcttcctgtgttacccctactcttccatcattgttaaaaaatgtgtttgccttttccatttagatactcattgtaaaatatatacttactacaataacatgaagagattttacacttctaaataggttaaaaaagattataacctacaatctagataataaggtttattttcttgtcttagatgttatttcacactcattcacagtcccgggaaaaaaataaacatactttcattttatctgtaaaagaaattaagtgtgtgtatgtgtgtttgtttatttcactcatcacagctaagacctccatatccttccctgacccacaagaaaataaaactaggtatagctggatattgttaatatgtgtacatgtacaatatacatatacatgtgtatgcatatatgcatatgcacacatgcatagacacaaatctgaaaaaggtatttgattcacatttaaattcctgggcaaaaattagtaataatgtggactatagaaaaggaaaggaacttgatgttttcacattttgcatcatcttgccaagtcatctttaatgcattttacccgaatcatggcaacttactaaatgtctcctgaattattaacctctatgccacctccacaggtaaaactcgttctcgcaaacctctgcagctggtggttggcactctgacaccgagctcggtcttcctgtcctggggtttcctcatcaacccacaccatgactggacattgccaagtcactgtcccaatgacaggtaatattagcatttgcttttaatagcatctgtacatgctttagaagaatatgtaagtatcaggactgttagcattgacttaacacctcttagctgtacagcctgttctaggtgtgaggggaacaaagtcaggggccctgcccttgagaaggttatctacctgaatagaaaacacatacatgtaatttttttcaaaaatcatgaactattatacaaggaagtatgagtcaaatagcaaatgggtggtatcagtaataagtgcaattagaaactcagaaggcggggccaaaggcagttaggaaagacaattaaaagttggaaagttgattggaaaaggatggatctttgatctcacaattgaagctcttaaatcatacttctcaaagtgtggttcccaaagcaagcagtatcagcatgtcttgaacttgtcaaaaggtaaattctcaggtccccctcagactcactgagttagaaactctcaaggtggggcccagccatttgtgttttcacaagccttccaggtggttttgatgcccactgaagtttgagaatcactggcttagaaaactgaggagagacacacaggcagagatataagcagaggaaaagcaagttggaaatgaagctaccattttctttggaagaacaaatgggaaaaatctaagtatatttttaaactactgctatttatccatccaaccatttgatgcatgtatttagatgcattggatggatatgtactaggccctgtgctacatgctgaaccatacttctaggttggttataaaatgatgtttgcttataaatatttactatattagcttcaaaactcagaaacttgcatctagaaaagcattcaaaattttcaagcttcaatcaaggcattttatttttaaagttttctattttaaatacattcaaagtgatttttacatttcagaagttttcttattcctttttgaataaaaaacatttattgaggtataatttaaacacagtaaaatgcataaatattagtgtacagtttgagttatgacaaatgcctataaccatgtatccaatacccatcaggaaacagaaaaattttatcactctagaaagtactttcctccagaaacaaccattgatttgatttctatcaccatagattagttttgcctactctagaattccatataaatggagtcatatagtatgggttttctgactgtcttctttcgctgagcattgagattcattcatgacattgcggatatcaataattcattcttttttgtactcctgagtgatagtctattatgtgaatattcaaaagtttattctcttgctaatgagcacctgaattatgttgtttttttttatgtatatgaatacagactgtataaacattttcgcataaaattttggtggacattttaatttctcttaaacataagtggaatttctgagttataggaagatgtatattacgtatatttgattattttttgcctaatttttccatctacattcccacaagcaatgtaggagagctctgattgctccacattctaaagcagcattttgtgttgtcagcatctttcattttagccattctagtgtagtagtttttcattacagttttgatatgtatttcccttacactaaggctattgcatacttcttaatgtgctttttggccatgtttatgttttttgtagtgttttatttatttttatttgtccaaatcaaactaaaatgaaggaatttttaaagtgtttataagttctcaaaatcacctttcatctgacgttgggaaatctagactcaagaaaaaaatcaaatttcccttcatatgcccatggttctcaagggatgaatacttggaaaaacatgtagaagatatttccaaaacccaattttttgaaaaataattttgaaatgcttcaaagaatctgaaatactttttatttcacccaccactaatcccatgacttattttgtttggaaaatggactcaaaagaacatgcctccttgtgataattccggttcctaatggattggtctggggtactaatgctgagaaaataaacacttatggattgctctttttctttttaaaaattatcttgataaagttatggagagagaaagggagaagagaggaaggaagaaaggaaattttgtagtcttacagcaaaatgcaacccaattttaagggttactcaacttgcttgatgaatctgtaggactacttgtttcaataggtttagtaacctggcaaacttgtgtagcataatttggagtaatttcttcctcccgctctcaagcctctcctccaatttcactttgtcctactgacacttctgtaaaagaatctatctgatgaccgattctaattgatagatgttgccatggtttgacagcacccggagataatgaatatagagaaagttaggacagatgacctaatggagctaggattctaacccaggctgttgactctaaggcccaagctattcagaccatgcatggatctcaccctcaccctcacccccttgcacacgcaccctggctctactcttatcaaatagatggaattaggcacatcacatcacaatattcaaaatcgataatttcattttgaataaagtcttttgaaagatacaataatgacaagcaagatattcttgaccaaagtagggaaccattaggacatgagttgaagggaagaattaaacagtaatgactaaaaaggagtatttggagtactagtaaatttcatttccccatgcttcctttctccctaattagcatagttaataaaccgacatttaaagtctttgtgatgtttgaggaaaaaaataatagccccgatttaaaagcctggaaatactgtacatattagaagcatccaaataaatctgccagaactacaaattagtgtaattagaagcagactagacttggagaaatctaccctcatatgttcatgcataatttttttataatttagactaatccagtaggttagcataagcaataatagctaaaaatgatggttatattctgaaaattggaagattaatacagctaaagttttacttcaggagtatctttttacaaaaccattgcaatctgaatgcacttggcttgctacaggaacaccaattggtatcattttaattcattgatatttggttccctctgtacagtctctgattttttaaaaaaatgatttacattggtttgtgtagcctcatttatcctgtgcaaataacagtgaaatttgtttttatattttgactatggactttgtatatcaaagctcttaggtagtaagtttccagttagaaaaccctcattgtttttgttttgtttttagcttggaagtatcaatgaaatatcactttatcctttgtggcgcatgtttctgtacctatttgcatagggtctttatgggtctcccatgctttaagattcctttctaagttcacatcggagagcagatgtgcttcatttacagtttttattcttaatgggctttgaatggaagagtgtacccatttgtcttcaatagagcctcaatttgaaagaaagctttcaaattggccctgatgaagagtcaactgtttttaacccaaatttatttcaccattaatagcttattttttctttctcatgtttccaacttgttaaagatttcaagattgctttagttctcactcttttgccagcgtattaaagctttatgaatagtttagaaatcactttcgcattttctaacattctcatcttgtgttttttttttctgtttttttttttttttttttttttttttttgaagcggaatcccgctctgtcgcccaggctggagtgcagaggcgcgatctcggctcactgtaagctccgcctgccgggttcacgccattctcctgcctcagcctcccgagtagctgggactacaggcaccggccaccatgcctagctaattttttgtatttttagtacaggtggggtttcaccgtgttagccaggatgttcttgatctcctgacctcgtgatctgccctccttggcctcccaaagtgctgggattacaggcgtgagccaccgcgcccggccgtgtttacttactcttaacgtagaatgagggctctcctttttggccagtccagagcagactctcttgccttttttccgcccccaagtttgtaagaagcgagtatcttcagtgtctgaattctcacctgattgaccccagtgccttgttacctgtctgtcttgccgtgtaagttttaagctcggtgaagacagggagtatcttgcccaccgttacttcctggtcccccgaagagcatcaggaacataggaggccccaagtaaatacatgctgaatgaaataaccagtgagatatcaacattctcacttttatgtgttaccattacctcaaactcaacatgacaagattaaactcagactttttctcttgaaatatcacctcacttgtctctgtattgctttctaaagtagtatcattgtcccattggctctaatttaaaacttcatttattttctatttttcacctactatcgtttatgaaggcccgaagatacattcgtttttcttttgagatgtacccatatctgcatctgtgtcttctccttgtccatttcacactaatgttcccaatccaagcatgcctcaccttaccctggattctggcaacagcatcctggctacattccctgctattttcttcccccaatctattctaccttccacagtactgaggaaatctagactatcctttatcaactcactctttcctcatcctgaatttatctttacctctcttctcttctttccaagaaacacaattctgacttcagacagtgctcatgatcccatctttcccatgtcgtctaagcctttgcttctccagtgatcccctctctcttccatttgccctttcacaggcagtggtgccctgcctcctgctggcaagcatgctcaaagtttctctccctgaaaacaaagccttctgttgatcctgttatgtattctaagctacttttcagtctcttttaatttccaaacttttcagagttatggctcccacattctgaattctgcaccatctgcacagtcctcatcccttctcactagttgccatcccttttccactgttccactgaaatgtctcttggtggtcactaatgaccaattagttactaaacccagtagagttttctcagtccttatccttcttaacctattcttaaactctttctttctttgacatttttatttagattttcctcttgcccctttaaccatttgtattagggtttcctagagggacaggattaataggagagatgtatatacatgaaggggagtttgttaaggagtattgactcacagaatcacaagttgaggtttcataacaggccgtctgcaagctgaggaacaaggaagccagtccgcgtcccaaaacctcaaaagtagggaagctgacaatgcagctttcagtctgtggctgaagacccaagagcccctggcaaaccactgtcattaagtccaagaatccaaaagctgaaaacttgaagtctgatgtttgaggggaggaagcatccagcacaggggaaagatggaagctagaagactcagacagtctagtccttccaacttcttttgcctgctttatcctagctatgctgtcagctgattagatggtgtccacccaaatggagggtgggtctgcctttccaagtccactgactcaaatgttcatctcttttggcaacaccctcacagacatacctaggatcaatacttggcttccttcaatccaatcaagttgacactcactattaaccatcacacctttccttttctcctttgctcactccttattatatctcctaaatgtggaatcatgttctatcttacctgcagtacccttcttatctatgtctagtctttaacaatcccctctatgcacaacagtgcttctcaaactttgtgcatgcaagtcatgtagggaaccttactaaaatgcagattctgattcagtaggcctgagaaggagcctgagaatctgcatttttaaaagctctcagaaattgcttttgttgctgttctacagagaacagaagtggcaagtatgtaaatgacttccagggttgaatctctgacctgggcccatttacaaattactaagaatatgttttcagttgtccatggaatattttcatcacaataaccaggtaactgtgattggcacctcacactcagactaaattcatactttctatactattaaaagaatacttttcccatcactttattctcacttttgaaaaatcagttttaacttttttcgctttctttggtacccatatcctataaggagtctggtttcatcaattctttcttagaactgtaactttaatctgttctggtttttatgtgtgtgtgtgattcctttccttgttatctcacatctggagtataccttgagatgcctccctccagtttctctgtgacttattcttccacgctggtaattctagcttccttcattactactcaactttatttacctactgaggaattgccaccagctccccactgtctaggaaaataagtcatagaatctctcaagaaatatacctcaatgcatatctgagtcatgctcatgaaatgaggtgtaaatccaatccacgctgctttccaggggcctgggtagtatgtcctgaagtaaacgacgtcaatggaatgggatttaaaatgcagcgtgtccatttctcagcttcaggctggatagtgccacacccagccccagctctatgctgtgtgctttccattctgccttcttcagtcatacacatatgcatgtctacctccttcattagagtgcaagctcacttttgaaactgcagaataccacttgcttccatctcacacagaacccagcattgtattttacaatagtagttctcaacatataagtgaatatgcaagtgggatgtcaagaagaggatttaaaaatcatctagccagtctattcagctcttgaagcttctttgcaacatctcccatccagagtccacagtgagcatctccagggatggcatcatagcatggatgttgaagatacaaattctggtcacactgacttacccgagttcaaaactctgctctattatcatcttagttgctttgcatgggttgcttaaatgcttttagtcttggttttcttatctgcaaaagggggtaagtaatatcatagggttgtcaaaatttagtaagatgacacatgtaaaatggttaatgcagtgtctagcatgcagtgaatactcaaaattatactgtctcctgctagccttctcattgctttgatattatttactttatgttataattgccaacttcaggcaagccattccatttcagatagcactaatatcagtagaaacatttcttttgttgtacttaaaccagccaccagtgggtgatactatacgaagaaaggagatcttagaaatagttgaccagtttgtgatgagtcagaattcaattcacatttgagaatcatggtaaaaataacttgcatttgccttatcatgatcctactgttgagttaggaaaatgtggttagacagactcacgttacttttttccagaggtaatctctagattactgtgtcaacccattgctttctatttggctatagatgtaaaactaccaaataaaagtggattttgtggtctacaaaaaaaaaaaaaaagttgaccagtttgaaaattatcacgagtccaaagatattaatgacctaaactggggctcacatgctaccttggaatagtggagaggcaagtggaagagaattcatgtaagaaaatatacttggatttgacaactgattggacatgaggggagaaaggactctgaagtcatcagaaatggggatcacaagagaaacagatttggaaaagaaaatgaagagtagattttaagttagttatgaaattcacagaggattaagtaatttggtcataaggttttactataataaagaggtcagccaacagattgcaaagaaatagagacattttgagtggtaagaaagtgggagaagacagattattaagaaatttcatgttaaaatatagtggcaggtttaagagaaaagtactagttttaattttgttggggtagaatgaaagatatctaaacaacttttagactcgggaaggtccgtaaggaatcaagggaaaggttggagatctggtggaataaggaagtggaatacaattattgagaagcttatctttgagaagatgagaatgctttttcccttgaaatcagagtgggacaaagagagaatgaaggggaagagagaccctttagaggaagggaatgagggcagaatttttctcagtagttacagtctcagtaaagcaagaagcaacactgacaaagacagtgtcaggatgtgttctttgacatgaagagtcaaaaatgtgggaaatagatgttttaggaaatgtaaaagtagttaatcacatagaaataaaagcattcctgaaggaagtatggaaaacccaaaagacagtcaaccatgtacattaagctggggtagttcgtagaaggactaagcttagtttggtgttcaatttcttcacttagtgtaattcactaccagttacatcataaattcagtttatggagtttctacttctgtctcaggtattttgttagaatagaatatccaatatgttgctggaataaatttttagaaacaaaggatctaaaagatagtggagtccagtccctctctgagaaattgatgcttaagagggtggagagatgcccccctcccaaggtcatgctactagtttgcagctgactaaaatccgagtcaagctactacctgcctttctgctacattttgaggagctgtggatttttcaatgctataacaacaattattggcagtattgagactattcaggtggcccaagcacagaataatgccagttgaaccaaatgctaccttcaacagtttcttacctcttaattaggatatgagatgctcttgttcttaaaattgaaattgctgaaggcaggctttctagaagtctagtctgatgacattcatagactactacctgtatttttaatagacttgttgcctctgtgtgcacttgtgctcaattttaatcattcacagaaaaagggtcaactaacgtttgacaagactgtgactatatgttatggtaaatacacattaaaacaaaaactaaaaagccttcaataatgtgaaatgctgattacttttgtttttcttccattctggttcatttttccatctttttccatgtcttttgcctagcaccacagttgaaagagtccagtgcagtacaaaaggcattagattaggagtcagaaattggcatttgcctgggtctgtcactgattatcagggcttagacacttcttgggctctcttttccttgtatgataattctttctctgctcagagtttattgtatggattaaatggaataggtaaataaaaatcataagccctgtgcaaatgtataatgcagaaatttattgtgtttggcttcagtttgctttggttctgtaggagtggtgcgttatgcaatgatgtgttgcaaaatataattgtagacctaatggcttaaatcaatatgtctttggaattgaataattggttacttagagatattatagtctaatttttaaatgacccttagagcaccacatattcattccacaaatatttatggagcacctactgtgtactgggttataaagaactgtttattatcataagacctatattttgttttaaaatcaatgaaaatttacttcaccactttaagtatagttaagtggcctaatctctctgcttgaaaaaaaatgatagtgctataaaacaaaattggaatttgcctataatatacaagtatcaacggagacagtgttgaaaaggacaaacctaactaggagaagaagggcaaaatgcctaagcctttattttcctgaaaaacttgggataagagggtatttcaaatgctttgtgatcaaaatggaaaagatttacactctggatttttaaaccatggtgaagtttagggttctttttaaagaacaaaacatttctgtctcatttatttataagcaggttatgtgagatcaagttgactgcaaagccttgaatctgaccttcagtagttctgttagcaacaggactcctgcatcatgaaagcagttaagtcctcagaaatgtatctactagagatgcataattttgttggcccatctggtctgattttagcttcttaacatttctctaagagccaggacggggaaaaaataacaataaaaatttcatgcagcgtatttgtcaagaaatgcatttcataaatcactgatattttgactcacaggacacaaaggacttctattacattctattacaattcaataatataacatttgtttccagtagcagttagtgtttaggctggaacagcctccttcactcattctgttttctgctactttggaatgggggaatggagccctgagcacagctttcactagaaaggagcaagctaatcaatgatggcaagcctttcagtggtttgtgcctagtaagaaagtaggctgaatatacaaatgcatctcatctctctctctatttattaaactacaaaccccctgctgacttcatgggcatactacctgtgcaccagacccccaacttagaagagcccaaatttggtttaatgctctgctgtcactgtcttaagattcctaataacttttgaacagagtctacgtgttcatttcttattgagccccacaaattacgtagccagttttgatactcatctctagatactgggattgttttgcatcaccaagagcttaggcttgacacttagagaatgctcaataaatgttttcagaatgagcaaaattcctgattttttaaagctttaaataaaagcaagtaaccttaatcttactccatttaattttgctgatgtaaggagtggaggaaaggtactaaccttttgaggaaaatgttaagatataaaaaagacccaaaaatagtttacccaatgcgtatgtttccatcatcataacatggcagctactatttcattctattaattcagtgtttaattaaaaataaaaagcagatgaagtttacctattgaccccatctcaaatcctatttttctcatcacctgctcactgggagttaaagcactatcagaaatgttgtatcctttcagtatttgttatccctttacagtgccaggaataatatttggtaacatatttcatacgtctgaatatttatgtaaatgataggaaactatatgcaccaatctgtaatttgtttttatttgatattttgtttctaaaatctatccacattgatacatgtagttctcccattcactctcattactgtatatagtagtatactgtacttgatctgctgccccacttacagcggctgtttaaagtagagccagaggagtctgtctttgtatttcgattctgccaccgccactggtaaaagtcagtagctgggtgatattgggcaagttaagtgaatgttctgaaactccattttcacatttgtaaaatgagattaataatttctaccagctaagatgttttcatgacaattaaaccaggtaatatatgtaaaacctaggttcaaaaaatagtgataaggattattttacacatatatatgtgtatatttatgtatatatgaatattatgaaggcctaagtaaatacataacagtgatattgaattggcattaactttttttatttgactcttaacttggctattggtcttctttttaataataaaaacagctcaaccttaaaatgcagtactgaatacatcttagtcttaggttcttttttttacaaaattgaatgatattacctctaacatatccttcatggatgaaaaagcttaaactcatacaactatgaaactaccataataattataaaatggcacctatgttctactctatgtataatagaatattatacatagtgtaatatctacgttttttctagtgttttccaactttcatcttgcaaagcagcaaataatagaacgagaattctggaattccattgggccaaaactgtgctgctgcaaagactccaacttgcaatgagaaattaaaaacctaagcacacgttgagcttatttttttcatgttctctgcaaattttttaaaaatcggaagagaagccaatattaaatagtatcccaagttggttgaaatctgtgatgaagtaagaaatttgaaataacattctgaatccctctgtgattttaaagcattatattctggttattcaacagattttatacaattcgctatcgagaaaaggataaagaaaagaagtggatttttcaaatctgtccagccactgaaacaattgtggaaaacctaaagcccaacacagtttatgaatttggagtgaaagacaatgtggaaggtggaatttggagtaagattttcaatcacaagactgttgttggaagtaagtacctagaaatgtttgtttcagtaagcttttataatttttttcttagttacctaatttttaattatgttattcattgtataatatgaaataagctaattcctaaggtctagtatttatgaaaatatagaagcaaagaagatatattgagcattgatatttcagaatctttagttataagtgatttttaaaataagtaataaatatttgatgcctccattgatgtcgttgtctattgtattacagcagtttaaaatcaatccctacctgcgaacaccaacagaaccagaaaaacaataacatgtaccaatgttcagaatggaaagctagaccagtagagatgcccataaaaagactttcgggaaccttgagctttcttccagtcatcccgtcattaaaacttcattggcatcagtgtttaaaatgatagtgattaaaattatacatccaagttagaggatgagttgtagttgtcttcataatgattagctagagttgatttaggagcaaggagaataaaaataatgttatttttcccttgtttcatcaggtaaaaaagtaaatgggaaaatccaaagtacctatgaccaagaccacacagtggtatgtaacagtttattttcaagaatgtttttaaaaaattgtatctgcattgttaaggaaatagtcttattataagatactgaaattagattaactgactagctatgaaacagtggagaaagtacttagttttaggaattagtttctttttcttaatactaagtaaaagcatgatttcaaatcatctctgatttgtttgaagttctaaaattctaagattcaatgtagcttattctaatattttagtattctgggtatttcaaggttatacatattatcttctgtctattgctttttaatataatgtttcaagagcaaattgatacatgatttatgtacattgctacagctcaaacctttcctttctattttctatcataccctacttaaaagagccagtctttttcacaacaatggagcaaccagtttgattttgtaaaatgcccagtctctgttcagttcagacaatgtttgcgttttatgaaccaggcatttccccatgaatctaaaaacatccttttctctgtcacttcagccactcggtttctcatgctctctttccttccacttttcaaaatctattctcaggaagcatcatgtctagtatataccaccccacctgggatgactgtaagtcactgttagagccaccacagacatgttcgcatttcaaatctcatacccagtatttagtttggtgccaaaataattgcagcttttgccattaagagtaacaaaggacattatattactgggcagacagaggaggcagttcggtgagaagaagggaatttggtccctagatattggaagtatcctacagtcaaatgaacgtgcaaagactattgtgggtggaattttgctctctgagatgtgtgcttgaggtgtgtggctgaacatctttttatgtctaattaaggagtccacagaatagccccatggatcatgtggcccagtctggaaaaaaaatagtagtatatacttcactgggattaaaaacaaaaaaaggaagattggttttggtaacagaaaatagtcttagataaagtagaactgactaaaaattaatctgcctaaggcaaatgttgttcatgtggtttgaaatggcagaaaagtgtgttcattgtgaaattattatcaaatagtaattatgaggttgttacaatttctaggaaaatatttcaatgtatttcagatataaatacaaaaaagagattgcaggtaaattcctaggcctgtttttttttctcgctctcttttttttaacttgtctgtttggttggttttttgtttttaggttttgctgcttttctaattgtctaatacttaaatatttagaatgttaagtgggaaaagaagcattaacaaggttacctataacaaaactacttataagggtagtataaaaccattaatagtctggtaaaactttagaacatcttttgttttctaaacatgttttcattacaaattaaaatcatactatatttgcaattttctatcttgctgttttcacttggtcaaaatgttatgaacatatttcttatcatcaaatgctcttcataaacataattttaattgctgtgtactgtatgatctaagtgcatgattataagtttccaatttgtaggcatttaagttacttctaattgtttttaaattgtgggtgatgttatagtgaacacttatgataggtttatgaacacttgtgataaagctttgttcacaatgctaatcatttccttaaaatagatacttagaagaggaattaacagtttagagttttaacatttttaagccttcctaatactatggtcagatttctttcccgaaaagtggtactaatttataaactcgccagcaatgtatcagtttatgttgctatagtaccctgattgtcaactttatatattttcatcgctaaattgttggctaatgtaatagcttataattgttatcttaatttttatttctctgattgctgataaagcagtagtttcttcacttattagccagttgtattttccatttaatgacattctcttgcagttctttgtttgttgggcgtttcatgggttctttttagaactatatagtctaagactgtatacactaaagaaacattgacctgttgatgatactatctagaaatatttttctcacatttgttatagcttaagtttgctcatagacatttttgaaatagacaactcatgaaatttccttaaccaaattattagatttttccattgtgatatctcaattgcattatattttagaaaggccctccctctccagagagcagataaatatttctttcctttcttttagttttataagtggtttgattttataataattctgtgaattttatttaactatggtatatagtaaggttctatattgattaggctatgtatttttcccccaaataaccaattggcttagtactgtgtatttatgtattgaattgtgcctctccctaagttcccttcatctttgtctcttaaatccagtcaacattgtataggaaacgtagatctgctgtacctcacaggcaaaacagtgggatagaattgctctttcatcctcttctagaaaaatcctcattctttgttgtgaatggttgcctaggaagcatacattgtctcctaccctcttggctgtcatgcttaacctttcatgtgactccatgatatcatttctttcattccctcttttcagctatcatatcccagtaatttgtatttgtcttggcaggatatttcatttaggatgagttactcagcaagattgggaaagatgattgacgttttactctcagggaatttaatttttttccccctcaatataagcagccatgataggaagggctaggaagcaacttcctgcatgcatgacacagagccaggcattttatcacttcaagctgtgaggtggagtatcctgactccagccagctctgatgagtttaaaactctttgttatttccaaaggaaaaaccaaattcattaaaaagatattttaagccttctttgagaaggtttattgtttccttctggacagcaaaaaaaatatatatatatatattatatatatatgaacttacatctctgctctcaggtagctgtggaacatggggaagtagtaacagaactgcatgggataactttgaccatgttatgtgaccacatacaattgattctgagaagtggtttgatactttggaggtatattttagtccaaagaagtgtatacccaattattcacccatctcttctctgagacctatcttagaaggcaatacttcaagagatatgaaattaatttcacatgttttgctttttggatttcaagcaaaaagacacattgaaaactttttttattcatatgaacatgcttacacctgaaaccttagaagcagcaaaaactcttgaacaccttccaataagaggtattcggaatggaaaaaaacaacttgaactgtaggctgtccattttacagataaataaattttaggtcaaaaatttgaatacaaaatacagcccatcctacccttctggttacactatatattgtaattcatatatctagatatgtgttctgctgacaggcaagccccagtgcaattgtgcccagaacatatagcagggaatctcttctggttggctagtacctttgttctaccaattgttaaatgttttcaatattgctcctacctatacctctagaaaaatcagagaaagggcatatgcagaaacaaaactgtgattctttctatataaaataaatcacttgagatccatatgattgaggaagaaaaagatacatttatcatgatgcttgtgctttttttttccatttagagaatctaggacactcttttttttgaaggtaaaacctaatgtttactattaggttttattattttaaaaaataaagaatgatggctaatattttcatacattttctatattttgaaaaaatgtattacttaactagctaaacaaaatcaatatttgaagtatgtagcacttattaacagatttttgaaagcaaatttaattatttaatctaaatcttcctagaatcagtgttctccaaaaatatgacatctatttttatcttttttattttccatcagagatccacccatattttaagaaatccacagttactatcatcaaaaagagaagtggtaccacttgttaaaatgtaacaattatcaaatgattgatgtgaagagagattacctttatggtccccacccacactttatgactgtgtacagtgaatgtatcaggcatccttccattcttagcaatccttgtctcaagcagacacttgaaaaatttctgtgtaggcaaactattaatacatcatcaaaggttaagttgaccagaaatttgaagccttttgaaagtaggacattagattgacttttagccagatgttagattgagtcagtatgttttgtaactttcattagaacatcctagaagtgaattaaaaccagaatctaatatgcccaagttctcatgtggtttgactcttgagtcattgaaatttgactttgagccactgttttaaccactacccaaatggacagctcctctttatctcggggcctgaaaataatgttaaacctacaatactaatattctgatgccacaaaaatgtcaaatggacaaacctacaaaaaataacatccttagttatcactaactttattacagctaattttcaatatattatcaggaggaagttagtgtaatgcagggtgagacgcaagttccttgtcatgtgtggtggtagcagcgtctgctgctgctactgtgggtatttctaaagaagcatatgctttcctagccatggcaagaaagcatgctgcatttgtctccggggcatcaccctttagactctagtagtctctccttattgagtgtcaccaactgcatgcttcgccacagtgtcccagaaaatcagtaaaaataaacgatcttaaccagacttctgctcaaggcatagcccaacctgggtttgtaatggacaggatatctggaaatgaagaagaaaaaaatctattataggacaagaaagaaatatgcttacttcctgccatttagtaaacattgaaagacaagaactacggaaggaagaagcggtagaggtttgcagcaagaatgggggaatcggcaagctgtagggaaaagagagccagcaagggaatgactaagaaggaaaatcgctgccagagtggtgtctgaggacagcagtatcgtgctgaggccacaccagccaaaacagtgtgggagcctgcggggctgtcactgcctccttcccatttccaggccccacactgtctacatctgtgactctgatgtacattaatagctgttcgtaataacaagcctagaaaaagtaaggaaaggtcagcaaggaaatgtttttttaaaacattgtacgtaaaacagttctattaagattggattgtaattggttaaacactgtatcttggaaattatcacagtacttcattttgcagtgagtctggttaacaaacttttccctgcccttttatttgataagacataggagaggattcacattgtgaatttctgaatggaaattgtagaggtgttggcagagacatattgagccacaggactttcctgatgccctttaaaaacctacctgtagagacgcagctatttgctcattagtagagtccttatgcatctttggattgtggattaagcaggagagcatttctaggcctagaaaaaaaattgcattcttcagctaaatgattttttaatttttggcagcacatattgtacatatgttcttgtcactttaactggacactggtctgtaactggacactggtctgtactggagtcagaactcagaacagaaacgttgttccattcatgtgaagagcagaatattttccatttgtccttgtcaaaaaatggtttgtttgaaacaaatcattacaacaaggaaaattaaactggtataatgcaattcagcagcatagcaacatgtaggcttttctgctctaatgtgttaagtatcttggaaagacttcgcattcaacaaaacgtgcgctaagtacaaaatgtgcactaagtgacaggagatgtagggcaaatagaggacaggccattcaaaagcctctgcagctgcagccacagcctgaacaaaaatgattattggtacctagaaaaataatgtggctctcttgcctggcagctcccatgtagttgaaggttgccatgccaagcacttaaaagtctcagaagtgtcaaacacatagaagcagagagtagaatggtggttaccagggggtgaggggcaagggggcagtgaggagatattgacaacgggtaggaagtttcagttaggcaggaggagtaagctttagagtgctatcgcacagcagtgtgaccgtagttactattaatgtatagttcaaaattgctgaagataaatttcaaatgccttgccacaaaaaaatgacaggtaagtgaggaggtggatatggtaattagcttggtttaatcatcccgcattgtgcacttagatgaaaacatcacatcgtaccccagaaatagatacaattatgaagaaagaaatgattttaaaaatagcaaaaaataaaagttgttttaacatgaacaaataaaaattctcagaggagttagaggctatatgccagcaacgcttttgctggagcaggcacaggtggagaagctggtggggcttctcttaaggtgggctcgtgagtgagtgcagagtgccaagggtgggcctaacttttctcccctggggaaggatctctgtgcaagtgctcacatgtaatagttttataataaagccaaaagggatcctcctgcccatataactgcaaagctgagagtttggtattttttatcccccactgaaagttatacttatcttcctactattttcctcctgttgccaagaaagagcatgtctaaattatatctgcgtcattcctctagttatcaatagtgtatgagctaagttgcaatacagaagcatgtgtggtagctaaacagattgttgattaaaataactttttctgcttataaatgtaatttgcccttaccagaaatttggcaaatatagaaaggtgcacaaaataaaatgaatgttggcttacaagaaataaatactgttttaaggaaacagtgatttatttccctctggcctcttttctatacatgtatttataaaattgtgttatactgtggatgcaaatttgtatccttggtacttatttatattctgcatttttccattttattaaatacaagtcaaatttttgaactatcatttaataaaacctctatttttggataataaatttattttaagttatgataataaacactgtctttgattaattccttaggccggattgctaaggaggaaatcattgagtcaacgcatgcaggcacccctttaaaaaaataatctgataatagtaaacttttattcgttgtgatttttttaaaacataagaaccttaatatgataaggaaaatagctaacagtaagcctggtatattgtcccttctttatcagagggatatcacttattaaaatggtagtatgtcacaaagtatgttttgctcactaccaggtgtttgcccttgtaagggatttggtaatcatgtaaacacctatctggtaagcagctcatattcagcacatccttgatgatcaacaggtctagtatatgccatatctgtatcatgtatacaggctaaaccaagtatcagaaagtggacatcagtcttgccctttcaactcaactctaattctcctgtgtataattttctgcccttctcctcacctaccctgtgtccctctaagtctgtcttatccttggcctcatgattatgtctggcaatgactctgctttaaagtctgcacccatccctaggtcaggctactttatgacgtcagaacctcctgtgggacttctgaggtaatttgggtgaggagaggaagcagagtcctctgggatatgtccttctgattctgaggtcctttgtgtataaacatgtgcagaatggttgaaagtacaggctgtggaataagaaatatctggatcagagtccttgctgtgctttcttgagcaataagtgcttggcgttgggagctcatggtagttgtggtatctgtagtaacagcagcagcagcagcaattggatacactcaaacaattgatcttgattggttttcaaagataataggtagcttagcatctttttgagagggactgtaaaaacaatttggcggtgtcatatctcaaatgtaatgaaaataaactaatattcagtacagaagatttggtttctttccattgcagtttctaagtaaagtgaactaatgggagttctgaagaaattgcttctgtcaaaccttgggatatttatgagggaaaccaagtgaatccaataaagtagaggcagatggatgtactaacaatctaaccagcaactttttttgagatggagtctcgctgttgtcacccatgctggagtgcaatggcatgatctcggcttactgcaacctccgcctcccaggttccagcaattctccttccttagcctcccaagtagctgagattacaggcgcccaccaccatgcccaactaatttttttttttttgtatttttagtagagatggggttttaccatgttggccaggctggtctcgaactcctgacctcaggtgatccacccgcctcagcctcccaaagtgctgggattacaggtgtgagccaccacgccccgccaccagcaactattaaaccagtgtcacaggagacttcattgaagacaagaaagggctacttccagttctccgaacgttttaaagaacagaaagttattcacaatgactcaaaagttgactttcttcttctctttgcagccagcatatgtcccaaggaaactaatcccaataacaatcatcaagcaaggtaatttgtctgctctggaaatgtgtttagagcaatctttaacatacttttagctaaggtaatcaaacacggcacatattttctcgattttttaattgattttttttttgagaaaaagttcaaagaaaatataatggtctagtaaactggaagttaatggataattttggctcttttaccaatacaccaagctttgggctggtcacactggtcagacaactaaggacaaagcaaccatcacaagtattaaattttttaaaacaagttaaatatgtggagctttgcccaagattaagttgtcatacccgaagaaacccactgatttagtggtcactttaaggaaagtaaagatatccaggtttccagaattataatgtcacttcacgtcagtatctgactgtttttgttttggcttctggtttttcaaattattaaaatctattatttccagaaagtttcttggtagaagagacagggcccttaaaaaaatagttcttcattttcagaaaacacaacatcccaagtgtattctcaaaacagaatcagttagtgttgatattactcaaaggctctttgagaaaataaattttctaaatttttattgctgggtcatcacctcattttgtgctagtactgattgatttggggaaaaggaaagcttcagggaatagagttaggaagaaaattttccagtaattagaatggaacaccttatgatagaataatagcctttcattagttaagggcataggtgttaaggtaaggtatgccttccaatccttctgttggctatatagccaggccactgagttgctttgtattaattaataaagttagatcaaggcttttccagtgcagatggcttcacattattagcttcttactgcctcctatttcccaccccctcacactgtctttttgtatttcaacagtgattcagaatgttactcacaaggattcagctaaatccccagaaaaagctccactgggaggagtgatactaggtgagtggatctcgaaatctatgccgagattaagcaaatcgggctatcttttgaggatagggcttttctggagttttgcagtgtgagtagttctgtttaattgatgtggttcacttcctttcactgtttagcatcctggctcgtgtccattccaggctaggagccaagccacgctatctttatcatggtgtgttaaagaaatagctctagcacatgtgcagtgggaatgatggcacctgtcctacctgccccacagagttgactgaactgcttttttaaaaatcattgttattgataataatctttgttcaccacacatcttaagcagccattatacaatttttgagtctgtggattaaaagccagaggattttagaagtttggttaaatatgaaaaatattctatttagaatgtatggttatattttttccaatgttttaaagtttgggttaaaatttactaagcaaaataagtgctatgcttcatagtttgtaatatctgatgtgctgagcttcattttatgtcatgatgcactttcttccccttatcttatttacatctatttccttgcagtccaccttattattccaggtcttaatgaaactactgtaaaacttcctgcatccctaatgtttgagatttcagatgcactcaagacacaattaggtaagcagaaaagttttgtatttgaactttgcagtaactgagtactagcactgatattcttaggaaatccaaagaatcttgctaatgagctgtttgaggatctcaaagtaaaaaagtagaggcaaagaggttggagtgttggaggtattcattataaataacattctataagaaaatggttattttatatgtacatatttatataaggtatatttatatgtatgaaatgagagtgaatgtttatgaaaatcttcaaaatacatatgtataactttctaataaagtaattctaaattatacttactatactattatggggcgactaggtatttgcaatgagaattgatgtgaaggtcaggttcattagaattattatttacttgagattgatattgcttcctatttctagaactggttatgtgttcagtgtttaaaaaacataaaacataagagtaaaagaaaaaaacggaaaatccacttaaaaaagggccagggaataaatgtggaggtcactgggctgagttggttgctgcatttaagtatcaaattaggctccaaattgtatcttagcagagaatctcaagcttgatcaaacatcaggagcacctggagggcttaacacaaagactgctgcccaccaccccccaccaccaacccacctcccgaattactgattcagtaggtccggtatggggcctgagaatttgcatttctgacaagtttccaggtgatagtgacactgctggtctaggaaccacactttgagaactacccctccaatgtctctagagaataccttgggctgttaataaatttggaagaaatggtgctgtagaaattgaacaaaccttaagaatacagaatgtattccctgagctaggcactggctgtgaactttaatgtttaatatatgattgaatcagcacattgtatggataaagaaacggaggcccaagcccctgtttggccacagtcattcaacaaatactatgcattaccctatgtcaaaaccgcaagttgctgggggctatgatggtgagttacccaggcatggcacctgctcattctgggacctcagacaaggcccttactttctcctcccctactgggggccttatctgtctgcttcagttgatatttcctcttttttggctgagagagaggcagaagaaatgataaataagatataacccaaatattttttatttcaagaaaacaccgtgaaacataacaataggctggggtcctaggtgggcagaccctctggtcaggtcagggcttgctgtgatctctctgttatcaagagcatgcatccactgggaacaaacccttgatgttcctgacaagtagctgctggtacagtgcggatcccacaagccaataactcttttcctttttccccctttccctccctgccctggagacttactgggggaaaaaagacatcaaatctaatgaggtaccaaatgttgatgtctttttcttgtttccaattttcttctttagggaatagggccatgtagagatgtttagaagttttgtccacataatgtcaagctacttaattttttaaaaaaacctgaaaagaaattgctatctcttcatgtgtttttcaaatatccagacacttaactttgcataaatagtgttacctgaaagtttaagttaacttttttcattttttgcttgactgatctggggcaatccagttataagaattttaaaaggcaagctcttaagttctcgttaggtgctgattttgagaaactcctggaagaaggaagaggaaggccttaagttggtagaaaagcacttaactggggactattagacttacaatttttgaaaattttccaaaacgtatggttcaacatcttagtaaggtgtgaaaatatttgccaatatatctttgtggttttgtgcaatccttatatttttactttaaaatagtcatatctagtagtcctagagttagttacttcccagaaaatagtcaagtgactctggacttcattttcttaatttgtgcatcagacttggtcacctccctttaactataaaaccctgttatccaaccctacatcatgtaaatgtgatgctgccaggatgctcccaaattaagatccctcagtggatctgtgtttggaagagttaaagctctggactcttacattaacctgttctctgcccagagactgtatactttgccccatgcctagaacttgtttggaaggaggaaaaaaaggagctggccaatctcattgatttggtccctaatgttaccatcaaaactgcagaaagcagtgtttgtgaaggggactgaaaatgagcagagttgtttctcagaccacggctgtcagttttaaactggaagatgtcatggtctggtcctcagtgcttagtcttgagtgatatttcctaatctttaaaaaaaaatttaaaaattctacatgctaccataataccaatttagcatttttgctttctttaaggaattaaagtggatttttgtcttgtgattcgtttttacttttgttcttctgatatgattcactaaaagtccagaattaagtgttattttaataaagaaaaaataaatgcaaatagtaaaatgcaaataattaaaactatgaaaatagtaagtatgtttttaaacttggcttttgagggaagtgcctatcttaaattgaatacatgggcaagatggggtggttcatgcctgtaaccccagcactttgggaggctgaagccagggaatcgtttgagactagcaatgcaagactagcgtaggcaatatagcaagaccccatctttacaaaaaatattaaaataaaaaaatagccaggcatgatggtacatgcctgtagtcctaactactcagaaggctgaggcaggaggttcactgaaacccatgagtttgaggtttcagtgagctctgactgcaccactgtactacagcctgggcaacagagcaagacctggtctcttaaagtatgatgctaataataaaagaacacatagaaaatttaacacatggagaatttcttacacactgtattagtccattttcacactgctggtaaagatatacccgagactggacaatttacaaagaaagaggtttaattggacttatagttccacatggctggggaagcctcacattcgtgatggaaggcaaggaggagcaagtcatatcttacatggatggcagcaggcaaaaagagagctcttgtgcaggcaaagtcccatttttaaagccatcagatcttatgagtcttattcactatcacgagaatagcatgggaaagacctgccctgatgattcaatcacctcccaccaggcccctcccgcaacatgtgggaattcaagatgagatttgtggggacacagccaaaccatatcacacactgaagagactgatagccagtatgtttgaaaatgtctgataaatcaaaggaaaatcctacccaacaaatgtaccaacttagtagaccatgtttctttaaaaactacatatacaattttttaaaattttttattgtatatgcttcaagcatccaagatgaagttttttttatatgtgtacctagtgaaatagttaactatattcaagcaaattaacatccattctcttgcatagttaccctttgtgtgtgcatgtggtaagagtaccaaaaatcttaacacttttccaatatacaatattataattatagttcttgttttctactttagatttctagtcttattcatcctatgcatctgcaactttttaccctctgttctacatttccctgtttccccctctccatcccatccctcataaagttttattctctatatatgtgactttttttagattccacatatgagtgaaatcatgcagtgtttttctttctgtgcttggcttatatcatttagcataatatcctccagatttatccatgttattgcaaatggcaggacctccttttttaaggctgaataatactccagtgtgtgtgtaccataatttctttatacattcatcaatgaacatttaagtcgtttccatatcttggttgttgtgaacaatgctggagtgaatgtgggactgtatgtatctctatgaggtgctgatttcatttcctttggacgtatgtccagaagagggattgctgggtcataaggtagttctatttttaattttttgaggaaactccataccattttctataatagctgcaccaatttacatttccacctcaacaataaacaagaatttccttttctccacacccttgccaacacctattttttatcgttttgcttaatatccatcctaacagaagtgaggtgatatctcagtgtggtcttaattttgcatttccctgatgatcagtgacgttgagcacttttttttttatacctgttagccatttttatgtcttctttggagaaatgtctattcaggtcctttgcccatgttttaattaggttatttggggttgagggtggttgtgttattttgtttcgctattttgtgtaagttccttatatactttggatcttaaccctttatcagatacatgtggtttgcaaatattttctctcaatgcataggctgccttttcattttgtttattgcttcctttgctgcacagaagcactgttttttgcaaagtgtgggcataaacagtcctttatgccatgaagggagaaataaactgcgctgaagttaattatcactgcaactcaaaaaagctacattttttgaggtagtaaatcctaaaaacaacatcctcattccagcagagctcataacggggcatcaagaagtataatagcttgttctaagaacacatggtgtgaataatgagagatataaacaaaaaagttaggattacacacacatccccaagggacatacaaagggtttgccaaagtcaagacttggcctgccaaaaattaaaggaaacaactgtgatggaaaaatgtacagaagaaatagaggaaaaggaatttcctgggttttaggctgtgttctgattgcattttactttcctattgccaagattgcagttgtgcatagatagtgtgggtgaatgctcaggggttgatatatcaagagttccccattcaaataccctccccaactactaagttctctgatgtctgaaatatcatttatagatatacagtatggcctggtgcagtggctcccacttgtaatccaagtactttgggaggctgaggcaggaggatcacttgagcttaggagttcaagaccagcctggcaacatagtgagatcccgtttttgcaaaataatattagtaataagctaggtgctgtggcacgtgcttatagtcccagctactactagggaggcagaagcaggagaattgtttcacttgagcccaggagtttgaagtttgaggctgcagtgaactattatcatgtcactgtatccagcctgggcaacagagtgagaccctgactcaaaaaaaaaaaaaaaaaaaaaaaaaaccaaaaagaagaagaaaaaacaatatgcctgtaaaatgagttagtaatatagaaagaatataaatgtctctgtctcttaggaaggggtagtttgcctttcttcattaacagcctgattttaggctaatgtgattgccagctaagaacatgttttgaataaagaaattgagagcatcgcctgtgaaagtctaggatctggacgattaaacaaataaataataagaggtcctaggtcagccagggactcactgagaacatgggatattcttaatcaggaaggagccctggaaggagaagagaacactgaaagagaagagatcgtgaaaggaaaccttataattttacatttaaaaaaacttcctgtggggcatgttgaaaataataggaacagagtgcttgaaaaattcatgatctgaatttttttctgtgttgacaatcagaatggttcacacaaaagatgtcagaaaaaaaactgataaaatttagacgttttaaaaatagaatttcataaaattatgctagatttttaaaaagttcctttttatgccctgctaaattaatttgaacaatgctattaaatattttgttgtgtgaacatgctttgcaacttcagaaacacacaatttgttgcaaattatcatttatgacacttagtggtggcattttaaataattcctgaaaattagctatctagaaatctgttgtatgcctttatcaagtagggattgaaaactgatttgctgctataaacgtcgtgaaagatgactttctaattgtcttcaagctcatcagaattaagtaaatatttttgaacccacattaacagaaaagaagatggtctttacaaaaataaagtgaactacagattataaaatacatgttcaaagaattttgagtgtgaaaattaaagttttcaacagggagcaattttgtcccttagggaatatctagaattgcctggagatattttggttgttagaaaagtatctgtggagcacaaaatattccaaaagtgtgtgagagcactattggaatccaatgggtagaagccaagaatactcttcaacatcctacagtatacaggccagccacccatacaaaaaaataatctagcctcaaatatcaatagtgccaaagttgggaaatctaagttctgtatagccttaggactctgaaaaatcctgtccgattatgtgatcagctcaaggtggcatgatcagggtatcccaaaggggcatgaattctttcatgccactagactgtttcaaaatattatgagcaggtaatattatgattcaacacagaaaataactgaatagaattaatcctaattataccctttcaaatggggaataccataatcgctggggaacactggcttagaaatgttactttctttgaaaaagaacatctacattttaaaatgaagtttctcaaatagttgcataaagaggaaaaatggaaaaaattattctttgtactgaattcccacagagattaaaagagaagatctacattaatatgaggctcaaataaaatttactgttaaattttttgccacaaatattttcaaatagcttagtttcctatgtgtggtgtttgtggttttctaaaatctcaatgtcataacttattacattttttaccatgtagaataacggaaattttctttttttttttttttttttttgagacggggtctcgctctgtcacccaggctggagtgcaatggcgtgatctcggctcactgcaagctccacctcccgggttcacgccattctcctgcctcagcctccagagtagctgggactacaggggcccgccaccacacccggctaattttttgtatatttagtagagacagggtttcaccgtgttagtcaggatggtctcaatctcctgacctcgtgatccacccgcctctgcctcccaaagtgctgggattacaagcatgagccaccacgcccggccggaaattttctataggttgattttttaaaattggcagtacttgaatataaaattccaggaagcatttgcaatacaacctatgccttccagaaattctatttatcaatcagatgactttgagatgtatccaagtattgggttgtgattttttttcttcatttcaatgccaatttagatcttaaagaattacctagggttaataagaaagaattatgtagggttaataagaaagaattttgaagacttatattagttcctgctagagatacacaataaagttgttgactggctggtggggaaggagtgtgagattagatttttagtctgctacttgattatgcattgagggaggtatttttggacactgcaagtgagataaattgtttgttctctgactttttagctaagaatgaaaccttggcattacctgccgaatctaaaacaccagaggttgaaaaaatctcagcacgacccacaacaggtaatgagatcgctatgttgttgaccttgagaaaagaaaaaatgctttttttcaaatactaatctgcagtctttttttcagtaaagagccagtaggaaatacattttgatcataaatgcaaaacagtaggagattctaggtctctaacgtttgggaaaacaatagctgcaaaatggagtattgaatcacataactgatatgtaatacagaagctgtattttttactctaaatgaaaattattagttcaacactgaaatatttttatattaaaaacatcataccacaagtttggtgctgttctttcatatgatgacattagaccatttttcatttctacacttttacaagtggtcagtgtagcaaaatgccatatattcttcacaaatccatagcttaatatctatgaaaataccctggaatcatttagaaacaaatgtctctggaactttagcaatcctagtgtagagaatatagaatagttcagtaacaatccttcaaagaattaatgcagtaagcattttctccatagtttgtcaccattactaacaaacattcagcatctcttctattaatgaactactcaagtccagtccaggggggaggcattaatctttgagctagagtttttgccagagtagtaccaccttatccaggacctgatgaaacagacatctggcaagaatttcccacaatctatatttagcagagtcactccaatctgtagtgaattttttagtccacaaaatcctataacttgaaatattgatgatgtaccttttactaaacttctggactcgtaactggtccagagaagataaaagttgttgtggcagtaaaataacttcaagaaatccattcaagtaggaatatgtctgagagagcaaggtgaatatggtccttttccaaagaaaagagatgaacctttcatccccaccttcatgggagttggagcagaggtatagctactggagtgacccatttggatgaaattcctagatggtttttgacttccgtatacgtgatcaatatccagaaaagcataggcatggctctatagggactccaaatccctttctccctcaaagattctacccactttccccaattatacttttttctcttggcagcatttctgatgggagagtctacatgtttttagtcctctgccaaaccctcctcagagttttccacttcagaaacacttaggaaaacaccacaacttattactcagggttattgtgtttattttgtgttcttgccctgcaacattccggggctttctggctctcaattcatttcagatcccagtgatcttagttcttatttctccaaaactgttgactggctggtggggaaggagtgtgagctttttaattgagctttttattacctttaatctagcatttgggacaaatctgtggctgagcatttaaattctgatcataatttcaattcattttcaagctttgcatattcattgcagtgtaagagagaagtcttataatgtggtagctctaagtaagacttttagcccagagtcatcctttcatttgcccatttattcgtttaataaactattatcttgattatccttcagattcttcaataaatgatttaaaaagtaataaactataatcatgtgcttgtttactctatcccaggtattgtgctaagccctggtgataaagaaaaaggcagatttaaaattattattaagcttataagtgtttcaatgaaagtcaggtcagagtgctcttttggatagaaagcaaacccagaaaggaccagttggagaggagtgtcagctcaggcacttgagacaagccaaggagctctttacatagtaacacaaaaagaaatgggctatacaaatatcagccactaattctaaaaggcaacaggatgtgtctcctggtctttggttgcttcactttatcttaatttgtaaagttgtgctttttacctttcagtgactcctgaaacagttccaagaagcactaaacccactacgtctagtgcattagatgtttcagaaacaacactgggtaattctaagaactttttttttttctaaaaaaacaaaagtaacaacgaaataactcccaggactcacagaaaagaaacctggtgccttaacttctctctccctccccactttctccttttccttccttcctggcagtggttaaccttcctctttcttggacagattccactgaagagttaaccacatggctgatcctggtgactgaacttctgggcaaatctggatgctaattgctaactaaatgccctttttaaccagtctctgggttatacagacagaataccagccttttaactcccaaatcttgggggagaatgaaggaaacctggaagtcttgactctgtgctttctgcttagagtggctttgggaagtcttgtgcatactaaatttgggaagaatccccaaaagtgtcatgcttttaaacaagaatttcatggcacccatgtttgttgtttcttagcccaagagaatctaacttgctttgttgttctctttcccctgaagaaaaggagcagcatgtgttttgttctgtaatttgatgttgatcttctcagccacaccactgccctttgaatgtacaccttcatattttaacagctatgtaacttttccagggaaggttatttccattaaaggtattggctgctctgtgtgcaagagtctgttacaaagcttgctgtgcatgatcatggttaagccacaacatcaaaacccaagtccaggagttgctaactgcactcttttttattgtagttctcagcaaaaggaccccggaaacattgcaaactattctaatacctcagtttgaattgccactgagcactctaggtaaaaaataataaatactgcagctttattattaccttggatattgtatgcatgcttcaaagaagtcttttgaattaattacgctaatttatacccaatcccttaaaggtgacacagtcttcaagtttaggatcccaaagaggctctccctatgacaaattgtttggttgggttgtttttcttttaagtggtcatattttaatattatgtttgattcttttaattcagaatcaatatgtcactgaacaaattgatcatttctgtattttttgtaaatgtgtttactctattgtctctcttaacagagaagatatatttatgatatttctgcagactgcttcttataattcttagaattcttctgagtgaagtatgagaaaaatgagggcagggtgcagcggctcatgcctgtaagcccaacactttgggaggctgaggcaggtggattgcctgaggtcagtagttcaagaccaccctggccaacctggtgaaaccccgtctctattaaaaatacaaaaattagactggcatggtggcatgcgcctgtaatcccagctacccaggaggctgagacaggagaatcgcttgaacccaggaggtggaggttgcagtgagccaagatcgtgccacgcactgcaacctgggtgacagagcgagactccatctcaaaaaaaaaaaagaggttgggggaggagcttacatataaagccacgtagttaccaaaactctatttttaaaagctttcagatggacattttctagttcagatgtgtttgcttggtttaaatttaaatgaaatatatttaagaacacacataaacatagctgaagaaatcagcaaactggtttaataagggtggaaagaagagtccaaatacagtagcttaaatttagtcacttaactataaaaaactgaaaaagaaactttcttatattcaacattgaaacatagatgtaagaaatactactaatggtctcttaacatgatttgcctttttgtgtttgcttttgtttttgcaagcttaaaattttaaaaatctttcctgttactttcacctcaggtcgtaactttctttatgtgtttcattacagctccaaaaagccttccagaatttcctgaggcaaaaacacccttcccttttgagaaacctaggggcacattgggtaataagagtaccttaaatttaatattaaggctgtgggtggtgattgcttaattctgcaggacacatttactgcatcttatttctggaaacctcatgaactgatagttaggcaaacaaatggttgatttgatttttttttaataaatctatttggattttctgcaaattcggtaaaacccatcagtcttaattccacataatccacttagctttttgtccttaaaaatgctgacagtctgacaccaaactctggtctctctctgaccactaatcaaatgttctctggatggatacatactgatttcttactgatatataatgactttttattgtattggtatactgcaggcttctggtagccacttaaccataccagcaacctatttctgtctcgttctcctgttaaaaaaaaaaaaaatcttcagcaaattccatttcttttcaatatagcttcaagtgaaaagccatggattgtgcctacagctaaaatatctgaagattccaaagttctgcagcctcaaactggtaattaaatccttttcttaaaaaaatcgattataacaaggaatattgagtaacttattgtttttataggttccttaattgattatcattatgctttgtaataaatggaaaatctatcatacatttgttgatactgagatgaacctcattttccccattacaaaagcaaaatggttttgaatgttttaaagacacctgttctaatttctggatactataacatcttagaaatgtggccagaacatgaactatgaattggctcattgatagagatctctttagtgacaggaaaacagtaccaaaataagaagcatcagcatgggtctgatttaacagtatgagtttcacagtctcttgcagggaatatttgcttctttttggcaaaataattaaataaacatttaagagcttactatgtgaagatagtatagtaagttctaaaatttgtaagtgtagcatgatatgtaggagagaccacaggtccttgcggttgataatagaccttggttccaggcctcgctctcctagtaaccatgtgatggctactttcctctacttttggaaggtattggtttcctcttttgcaaactgtagcaattggcttttttttttttcctgtggagaattcttgtgttccatcattaaaattgattgagatatgtttcttttacaaaaaatatttttctcaattaaattctgtacatcttttgattgcctagcagtcaactaaagtgcgtattcagcatatgagaattataagaagacctcagaaaccatcctttatgattacttccatgatttttgtgttttgcttatttgtattttaatttttgtaaatcttctagttgttttgactttatttggggtacatatcatatagtgtataatgaagttggatgtttcatgtaatgaacttaaatgcagcagcattttgtggtgttctccagagtccagcagaggactgggtttgagaaaggatgagcatgagcccccacagatcttggtgaaattatcctttctctagtatatgtaatgggctcagatatctgcaaaagatagaagatgacatcaaattaagggaatatgtctattatagtcacccctagtttccttaagtgggaacacacttgaaagttggccatgcttgttcgcttatccagagaagcctcaaactgtatctaagtcttggtttccctagtcactgactctaaaattctagtgcaattaactaaagtgggtgcaaaaacccctttagcaatccaagtcgcctgggtctaaaatctgggttctgagttgaatttcatactgagtgagcctctgggttcagtagccatcacccaggtgcagctgcattgtaattatgatgcaacaactagtctaggggcatatgtgatggtttatctgctgcaccgtgacagccctggctgtgactcccacatccctcaggagcacctgagccaagtgcctttggggatttagggactagataaacttttagatccctttcatcttttagcttttcggttataacatggggaacatggggttcttttgggttttctttaagcaatatccagtgtttggtttctatgaatattcaagagcaaactaaccaaaacatcaaggaaaccattttcgagactttaatacctggcatatgaattatatatgaaggctcgagttgaaccaagcattggggagtggggagaatatgttgggatgtaaaggttacagagttacaatgagacgaaaatagatgatatcggaaatgccaataaaggaaaggtttcttttgcctttaattcaaaaaaggaatattctggttttgccctgaaggagtatgagcagcggctaatgcagaaggaaactgactctttattcagctgctacactactgccagggcaaccttaggtcgccagagaacttccaactgagaactccccaccctctctagacaaagaattgagacttgtcaaaaactgtaataacagtacagtatgtgattgcacatattaacattagccatagaagcttcccatcctgccttataacagttaatttttatgtctttgctacttagcatgatcctcagtccaatagcatttggcatcacccgggaacttgttgaaaaggcagaacttgggctccactctagatctattgaaacaagatctgctttccaacaagatgcccaggcgatatgaacattaaagtttttgtttttgtttttgttttttgagatggagtttgctcttgtctcccaggctggagtgcgatgggtgcgatctcggctcactgcaacctttgcctcctgggttcaagcgattctcctgcctcagcctcctgagtagctgagactacaggcacctgccaccatgcctggctaatttttgtattgaacattaaagtttgagaagcgctaccttatcgatgtagtttatagtgtttttacatggtaccagtaagaatcatcgggtgtagttggttatagcaccataggcctcaaatcaatacaagcttgatttttcaaagtgggtagttaagtatctcttgtttctgctagtgtgcaacgcttccatttctagtgtaagtgctctgtggcatcttcctaacttacgttacatttcaaattaaaatttaataacaaatgtagtatctgtgatttaaagagtggtatatttatgtagcccttttatttcagcctttgttttgattttgtgcaaatttacatgtgtactaatgttctatttcccatttagtttcaacatacataataggtattttattttccaattactcacacagcttcctaaagcaactattttgagaactgacaaaagagacaggtagagatagtgtttaaatggtggtccacaaaaccatgaatcccatttttagttgcagtatcttttaaagaaacataatataggttggtgcaaacgtaattgcagtttttgccattacttttaatggcaaaagccacaattacatttgcaccaacctaatatttttaactggtattaatgacattattacagccaaatgagcacattctgttttctctgttggggtatgatgcatctatatttactatatcaattcctttcagccaacgaccagcagaacacacttgtagttgaacaaatttacattcatttacttattacaatgatggagaacacagaccatgataaactgggggatctcttagaagatgatagaaaagacttattgtaagagtttgtcttgtgttaaatgattgagggaagggtccaaggcagtaaaactttgctctgaattggatgcagtcagaaattgggagtaattctgtgattgaatgtcttcataattaattagaaggcaagaccagcagagggaagctaaagctgtgactggttgagaagccacatctactcgtatcagccagaaggtggggagggtaatgtttgtgctctgggtgatgttcatgtttttgtctgtgtgccacataattagagactggtcttgtttttgtcttgatccatcatgatcagagagtggtcttgtctgatattggcatcctttggaattgttgatgttcaacaggagaacaaacaccacagcctacctgtgggtactagaccagctcctggatgcctggggctgcttttctctttatcagccattaaatgagatttatcgtactttttgtaaagtttattttgctttactattttctggatctgttttcaacatattctgtatcagcaaatcagaatatgtgtactcaaaaagatttctgtaccattcttggatataaaagactctatgaaaattctaacttgcacactgaatattgaaattcctgggtcatttcaacagtttttggcaaccaggggacagaatatttgaaatttggaatatcccaggaaatctgagatgtgtagtcatcaaatatattcttcctgcattcagcctatttgtcctgatctgtcattagtgctgcattttgtgatttcattatttggaattgcattttgcattaaaccttctataaagtatgttgaaatgaaattgattgattttgattcccttggcaaatctaactttccttaaaatatataaaggtaatcatgaaaaccttctctataattatgtatcagaatataaaattacctataaattttgtatctagaggaagttgaccacactttagaacttaactgcttgtgacaatatttcacaaaaagtcagtctttctgatgatgcaataaaattggttcatgttttattgtaaagtagctagttaactataatctcagtgttgttaaggagcaagcgctagaaaagttctcagtgtcttccattcagatgaattgtgcatgtgcacgtatgtgcacctgcttgttggatcatttctctactggaatacaataatttgtgtttgcatagcaattttcttctaggagattcaaggggctattatataccatcatattgagacttccaaagtccctagaaactggcagaattattgtcttttatcttaaagtgatacaagaggaacttaactccaaatgggttagaggggggaaaaattaggctcattcatttctttcctaatatattattcaataaaccactccaagttaaaagtaaagcaatgacatatagcttgctctgaaaatttgagaacagcctttacaactgaggaaattaaatgttattactggggccatgtgccttccagatatggtgtataagaaacatcacatgatctgtgagaggccagccagtccctgaagcttattctcgttgtgaatgtgatcacaaatctgtgagatctaaggtgggatagagctaggttaatagccagctcaactaccagttaaataacttgttccatctataaaatggaaataaggtataaatttttcaccaggtggttacgtcttagaaataatgtataaattacttaatataatgcacaatatataaaggggtgccttgttttcatttccttaatacaatgaaatcttgcattggctgccaccccttcacatcatactgtttatcccaacttcctgaattgctacatataatcaataatagcaattatgcttttaaattacttaataaaacatgaggaggagagaagaaaaaactctaagctcattttatatgtatacaatcataccaaatgatctatgggtcttcatttcacttgtaaaaaaaagtttgagaatggaaaagacatgcagtattactcagaggttgtgctgccccctgggaatagcctaatgtcctattacccctacagcaaggatggtaaatcatatcacatagtctctctcttcagttacggtggcagcaagaatcactctataaactgggctctgaggtccttcttggatcaatgagtaaaataatgccactatcaacttgctgtgttttctgtgggcaccagggaaggagaagcagcataaatgccatgtatttatcatcccacagatgggtgtgtgcacgacttctaaagacttaatatgggttgggaggttatgtggaaatgagctttttgtttctagtttgataatgccataagtgttaagcctccttaatttacttaattgtaaccttaaaagaccatcattgagtaccaggagagtttcaaaagcaaataaagacaatgcttgcaaacccattaatttgaagtgtttgttttcatccttaggaaatcctcctgcctgttcttctcccaagtgtccagaaaaaccaaatgttgctccaactttactgttacttgttactaagctgctacttattctggtataatttcctcttgaatcatatacagttatcttgtagagacttcccttgacagagagaaccaagcatggtcagcttcagtttttccattagatttttctttgggagcttcctttaggaggtcatcactaattattttcagtgttaaattcttacagtactttgtagaagtagagtaaattgcatctgtattgagtcctatatatcatttcaaggcttgaaagctgcagtcatcagtatgcccaaggagtagtagattggttagaaagttttggcagcaggtggtttgctaagagtggttgaaaagaagtaaacatataaggacatgctcatttattatctgtctgccctgtaaggtgttgattagcacagatctggcccacccaactggattgagttcaaaagaggagaaaacgaaggagtaggttgtggtgttgatgctttgagagtaggaaaacagatttcaggtatagcagatgttttgtagattcactgtggctttgaagagatttatatcttcagcctttaattttatttcatgaacattttaatgaatattttcttgcaggcaatattttcacaaatttccaggccaactagaaaggtattttgtttttccactcactgaagaaagcattatcaatgtatttaagtggtactgtgaactctgtgtgtggtattgtttttctcctctagctacttgctgtatttttctcattgctccttcatatattttttttagaattccatttccatgacagggtatgtctacacaagtgtatgccaggtatttgtgtagtagaggaagagatttgtgtgtacacacgtgcacatcataacataattaaaagacatgttttcatttattctccaaactaagccagaaagttatccttactaagagcttaagctacccaaccatcaaactcactgttactgtttattgtaatggacatcttgcagattaattctgctgagtatccaccatgtaccagtttctggattaagtaagtcgtgataagcataatgagcatgatagacacaatttctccattaatgaggtcttttgtctaagagttaatgttaaaaaggaagttttcacatagttactaatattcaaaggatttgaataagataaagtcttgatcatatgcaatggtttgcctgtatgccatcacatgtttccacagcagtatcagggcatttttattgggggctttgcatctagtcagtttttcaaagtaaaactaaaatgtactatcaacaaaacataatttagggctggacacagtggcttgtgcctgtaatcccagcactttgggaggccgaggtgggcggatcacaaggtcaggagtttgaagccagcctggccaacatgatgaaaccctgtctctactaaaaatacaaaaaattagccaggtgtggtggcacatgtctgtaatcccagctactcaggaggctgaggcaggagaatcacttgaacctgggaggcggaggttgcagtgagctgagatcgtgccatttcactccagtctgggcgacagagcaagattccatctggagaaaaaaaaaaacatgatttaacaaagtagttttaagaaggtgtagagcaaatggtaatgcaagttatttcatattattttttcctctggaaaatctgaaagtaaaacttagttatgactgtaagtcattactattttttgaaataatctaatgttgacttttataacctgtaaattgaattatctattttatttgttgcattcgatttaacctacaacttttggtcccatgtatgttctgtgaatgcaaaatcagtaatactgcttaatgtcttatagctgtagcatttcacccactacaataagcatagtgatagaagtttgcctctaagtaataatatatgataatttacaggctaccatacagaagggttcacccttaactcttggctacttatcaattttatagctagtgtagcttttagaaaccaggcctaacaatttcatgaatttttctcaggtataggcatgtatatagaagggttttataaagaaatcaagagctgttgattgttagggagcttttcaaagaactctatttcaacactgtcctctcccccgacatctctttttgttgttgttgttgttgttatggagttgctgtcgtgcaggctagagtgcagtggcgagatctcggctcactgcaggctctgcctcccagtttcaagagattctcgtgcctcccgagtagctgggaccacaggtgcccgccatcccaggcctggataatttttgtatttttttttttttttttagtagagacagggcttcactctcctggccaggctggtctcgaactcctaacctcaagggatttacccgcctcggcctcccaaagtgtttggattacagacatgagccaccacgcccaggcaatctctttacttctgaatcaaaagatcttgtttaactcataaatgaaatgaggtgtggtgtgctgcttaaagctgaccaaacaacataaaacttttagtggcatatgtggctttttagcactctttttatttccaactcatggaaactacagaaatagaaatattaaaaacaaagtatgctggcaaatgtcttatttttgtcttaagtatatttgataaaatgtttggaagttaagggatccctgaaaattgggaacttccagatttgagccacagttgccaaaggatgatggaagaaaggcttctttccccagcgaatgccttatgggaataacgaggggagatggatgcctggcttggagcctcctgattgaaaagaaattgtaaatatgaaaaataggtaaaaagagtgaataaatatcatcttttggaactaaatacagactataggaaaattggtccaatgtcactaaatggaagggagctttaggagttaggataacaaagacagtcatgacatttttcaaaagcaacaatagaaataaaaagccattaactcatagtttcttacctagtgtgagaggattaaatacaagttggcaaagtttttcttattttgtaggagatagagctgaccatgccagatccatgacttgaaattggctgaaaataagcttaagatcagaaattgcgggcacttttgattaatcttttaaaaaattagtcattcttatctgaccttttaaaatgacagcaaggctaaaggaaacttgacattacaatataatagatgcattctcagaatgtgtgcatatctttaactcacaatattcttgctatttttgaggattttgtgaaatagtagattcaccttcacacattgcaatgtatttcctgcctctttagtatgtagtacaatataaaatgctgtctactttcagaggatgtcacatggtctgatactatctttcttacagcttcaaccagcactggctcaaaagcattaaactgtcattgaattacaagtaaccccaatgactacgtcttcctgtgagctcctttcttcttgatttctgtgctgccattttgaatggacaagaaaagcaacatctacctcgtaataattcatgtgttctctatatccctcgtgaccacagtgacagctgtttgtacaggaaagagaacactttgtgatgctgtttttgcttgcaggttcaactcttatgtgaacatgaaaattatccccatattaaaataagtcaatctttatatttaagctcatactactttcctttgtacagaatagaaaatttatctttaaacctgcccaaactcgagaaaggctcatggctgtatggagaagcacagaaagctgcctctaggtaacatgtcaggaggggaaggtgccaaaagagaatcctggttttagccctgctgtttctggtcctgctgaaggaaaggaaaatacactggatgggacaatttcagtgtgtgaccactggcagatgtgttcatgctataaaccacaacttggttatctaaaaaatggagataacctcctattgtctacaaagtggggctactgcctacctcacctatttctcagggatgttaaaagggttcaataagttgatgtatgagtaagtctctgcaaactgtgaagtgctgtccatacataagatattgtaacagtaacttttactaagcagaaagactgagcaatagactttgggcaaattgcctcaatgggactgctgttttccttctttgaaaatctctccccaaactgccatctgactttatttatgtttatactctttgcagctctttgatttacagctggcactgcatgattataaatatatagcactatgttctcatcaccctggaggccagcatcagggctcactatataaaatcctgcggttcagagcaaaaaaggaccaaaggcgagtttcggtgcttagatgttagtgacaaggctggcagcctggagccaaaatgtaccagtacctacataaaactgtccttcaaccagcattacaacatgtcatgtaatctttctaaattaatcaaatttaaccaaaattaacatctctcttgttttgccttttttttttttttaagcaacttatgatgttttctcaagccctacaacatcagatgagcctgagatatcagattcctacacaggtatatctggcctctcaattctgtctttggatcccaggtgttccaacacttggtggttcttcctttagtttttgcagagtggaaaattgtatcctctggagctctgcatgggagaaatttctacctgtgtcagggagttgtgttttacccactcctcccatagagtgattagttctttacatctctcagtaaataagctctgtcacataagggagatgcagatagatttggttgccactgaggaaaagtaatgtaatagcttaatgaattgttcagaatcataaaaaggtcttcgagtttctagagggttttgtctggagcagtagttctcaaatggggggtaattttcaactcccataccttccccaggatatttgctaatgtggagacagttttggttgtcacaacttggggaagcactcctagcatctagtgggtagagatgaggggtgctgccaaacccctgcagtacacaggcagcctcccacagcacagattatttgaccctaattgtcaatagtgctaacgtgagaaaccttgatgtagaacagtcacataattcattcggctgtagcagttcaattgggtctaatctttggcattcaattactgacccatctatagtgagttacctcagtccgacagctcctttcagcaaatgtttatcaaacacctactaaactgggtactgtaggagattcaaagggagtaagactggtttctgccaggtatagatatatgtctgatattttttgtatgtataatattatttgtgtcatggtaaataaagatgaataattttaaagagcagaaaataaaacaatgaaatagaatgtcagtggtgagttcagttagcaattatgaaacaaaatggaggaaaccagaaaaacgtgttgaaaaccagttgaatgtataaaacactgtttaatcatggtttctaatatttaaagtatgtatgttttttaaagtgagctcatcttcaactcctgatgtatcactagttttaaaatgtgggccagcaagccctcaagtattcttgatatttttcctcatatgaggcataatttattactcatgaatttgtattttattcctggggccttctactgcttttacaaatgttgacatttattccaacagcaacaagtgatcgtattctggattctatcccacctaaaacttctagaactcttgaacagccaagggcaacactgggtaatgtttttaacagaaaaatcatactttattttccatcaaaaaaaaaaatcatgtgaatgcctttcttccaaatgaccatttcattccatcacatctaatcatttatctatcctatttctcaatatatacatctatatattttaaatgcagtcatcttttacgttccatttagggctctattttatttttttgagctgtaatagataatattttccctatccttttagttgtgaaagctttgaaaactgcatggacgtcatcacctgcaccatctcacttcacatgtttgtggcctgtgtcactttacttccatgcatcaagtctgcctgaagtcatctactgaacaatcatcattctagccttttccctactttaaatcagaattttattcactagctttcaagactacatgcatttttcatctttaatcatgtactcgtggcatgtgctttataccatctaaaagcatgttaaaattcttcaaatacctcattttaactgggattatttgatgggttggggtgtttgtgctttcagctccaagtgaaacaccatttgttcctcaaaaactggaaatctttaccagtccagaaatgcagcctacgacacctggtaactaatgacatttatgtagttatgtatgcattgacgaaacaggtaatgtgagaagtcatgttggccatttcagaattttgtttttcttttgtttgtttttgctaaatatttcccttcagtctctaccatgaaattcttccaagaatctgactacttagccttatgattatccttaaagaattttcacaatcctgatgactatatattttgaggaattgtttccttccaactcttctttcaactttgccagctggaaactagcagcagaattatagataattatttcaaaatatgttcccttctacttaacacagttaggtaccatttgatcaaagtattttacccaaagtagtctaagtatagagagcaccaagtaggctttgcagtcctggacatgatgaagaaagatggttaaagagaggtaacacaacctacattttataacagaaaattattgaaatagcgaagttcattgactcttggtggggataataaagagctacagaattaaagttctgggccgggtgtggtgcctcacgcctgtaatcccggcactttgggaggccaaggcaggcagatcacatgaggccaggagttcaagaccagcatggccaaaatggtgaaatcccatctctagtcaaaatacaaaaattagccggacgtcatggtacatgcctgtagtcccagctactcaggacgctgaggcaagaattgcttgaactcgggaaaccaaggttacagtgagccaaggttgcgccacgcactccagcctgggtgacagagtgagactctgtctccaaaaaaaaaaaaaaaaaaagtagttccaaatttccattatttgtgcttctctcctgctattcaatgtcatccttttgagttcttaattgtaccttgtgttctgaaatgcctcaagggtgctcacttctgatacatttaattgaacaatgtatatcttcaattctcatgtagaaattttataccttttgtcccagtcaccccttgtttattgagcacctcctgtgtataaaacaaggtatactggacattctaaggatacaaggaaatataaagcagttcttgtacttggagtttgcaaatttacaggcacaacctgattgacccctgaaaaatatcatttatcaaagctatattaaatcttctttcagctccccagcaaactacatctatcccttctacacctaaacgacgcccccggcccaaaccgccaagaaccaaacctggtaaatgtctctttatatttacatgatatgtaattccagatagacaatgtccattttcttatagtaagaaggatagccaggtgcagtggctcacacctgcaactccagcactttgggaggccaaggcaggaggatcacttgaggctaggaatttgagaccagcctgagcaagctagtgagaccccgtctctgcaaaagtttaaaaaattagccaggcatggtgtgcttcttgagcccagaagtttgaggctgcagtgggctataatagcacactgcactcaagcctgggcaacagagcaagactctatctcagggaaaaaaaaaaaaggatatgttttatagattagtttctttacaaaatttgagattaactaaagatgaataattaataatgcagaataacaaaactcaagtgtccaaaaggggtttactgaaaattatatttttgcatgtgaattttggtaaaaacctagaaacaagtcccactcatagcaatacagagtgatacatgtaattcgttttttggtgtgcatgtttattataatgttcattcgagtgatgtttctattttttttggtacctactctgttttcagtttttcaccagggcaatggctgagttagagaggacatgactctggttttcaaatagattataaccttgagaagataaaacataaaaatgacagcacaacgtacatttacataacttatttccaagactgtaatatttttgtaaatgctccaagaaagagttgaagatacagaccccaaaatacatgtaggatttggaagaaaaggagaagggaataacatatatattatagcacagagtttgggtggtacagatgcttattaacctggaggtcaattcttcattgtcaaacaatatactcagaatcatgcttgaccaactgggttttgcttattccattataagataaatgtaattttgtatgatgtatactgttatgacagtttaacaattcttcctcaaaacttttactcattgtatactttgactactaaatatggcaggattttaaatggatcatttagttcctctttagagggtgtctttttattgtctctaggatatttcaatatttttttcctttccatcaccagaaagaaccacaagtgccggaacaattacacctaaaatttctaaaagccctgaacctacatggacaacaccgggtaataatgatatgtccttagtagatgtgttgcttcatttcaccatggaaaatccagtaccccagcttttatgtaatgtctgttacctgttaagatactcaaaacggttcatttgaacagcatggcccatctcagagagtgcaccagctccatggctattgtggttgtggctagctggcccaacagttagtagatctgaactcagccttcagatgtcattctgtgtcagcttttgaaccattgctgcttccttgtcatctatccagtcattgtatttgaagttgaatcttgtatatagttctcttttttttattttttagtaagactctcaagttcaacttccaacttcatttggaaaaacaacttttaattttaatgttagtagaattactttatgcttcagatcatagcattatacctattggtgaatttttttgagagtagtttttttcttattaaaatgtgtttaggtagacaggcccaaagtgacagattctggaaatattaggagaaaaagaaaaatgccaccctaaaattgtatgcaggaagtttaaatttattgttgcatctgcaaaagatatgcacatcagctactggttgaatgattttagatttttcctttttagtttataaagctgataaaaatatagctggtcttaatacctaggtgaggggttgataggtgcagcaaaccaccatggcacaagtttacctatataacaaacctgtacatcctgcacatacgtcagtgaatattaattgtaaaacatggtgttttttccccctagtgctcagacttagatgagattgagaaatatgaagtaagggtgcaaaataattagactgatttttaaaaatcatagattataagaactatctttactttgagtagttactgtgactatttagtagtaatgctatatttgttgattaaatatactcttgaaatgttttttctaaacaagataaaattaactacttctctgtgaatggatcatgaaatattctcttaatggaatatttccaaaatcttccaagacgatgagttcattccatttaatgtatagtttatttctaggttttccttctgtgtttttagacactgaaatgcctaaatattgatttgtttattattttgtttctttatttttccagctcccggtaaaacacaatttatttctctgaaacctaaaatccctctcagcccagaagtgacacacaccaaacctggtaattaccctaaacttttttgaatattccaaaagtggggttgaaaacaagttctttgcaattatttggagcaagaatttctgatttatattttgacatttgttacatttttccatgaaaagtgtaagcatgcaatgaaatgatctaatcataaatagccactgtgatatcacagcattgctctcagcaatgttcatgatcatcacagagaaaacacagaaatgtaatgatatgaatgattgcgaactcccttgtctactactgcaaaatagtttccaataccagtgttgactggaattctaatctcatgaacaatagcctttcagctggaaaggggagaagtgtttctatcttctaagaactctgcattattttagagtttctcagttctcaggctagaagaccagaaagacctgtattttcccaatgctccaagacttctaaattggggctgatttctgaacactgacctctgtttacctcttaggaatttttagtggtgttttcctttaaaaaaaaaaaaaaaggctgcttttgcaggaagggatcattctatatatataataatttaagacataaaaagacataaagattgtgtaacatattgaatgaccacatcttggagttttttttatctatctgtaatccatgtggcagttttaaatgttgacttataagattgactacagggaaccttgtcaccactcagtgtcatcattatctaaattttaaacccttagctctgggaagaaattatttctcacaataatgtttaatggattttgaacttgcatttccattaatggcatgtttacacagtaggattattaaagcaagagattttctgctaaagtgggtatgatttatttttgcaatgaaatggctaaggaagaaaaatgtaactgcttaaagaaaaaattctcattactccctgtaaagaagcagtgagatttccaggtgtaggtgcagacggaaggaaattagggattaggcaaagggagtatagttgacactgtgaccatggatgaggtctccaagtcagagaaatggaatgaaaaactctcactcagggttttcaggggaagaagcgtagctaataaaactcaaaagccttaatagtggtttaaatcaaataactctgacagctgtatgagagaagggtttaatacacacttatttaaaaatcatgcttagagagctttgggatagagtagtaactatgctgtattttgaacagaggactattaccaagcttgagtcaccaaatttaaataaggtttctctcaaatgaattatttctgttattacaacataaaattggaaatagtcaaatttctccaaacattggttatagtttatatatgataggttgcgttattcatttcagtggtttctaagacaagatttctgagaggaaattctttaatacaaatgagggaggaaggttatatttttatcattgtaaggtgtttgagcaaaaagacttcttaatttgacatttccttttaacatgggaagaattacttggaggctaatgtgtttacattcctttgatttctaaaccttctaatcatcaaagaaaatccaccccttttcctctaacagcaatgtaatgacttcagaatccacacctaggcctgtgccctcaaatggaccttgaatggtccatagcaacacaggatgatgactggatctccgcaaaccattgctttgattttagcttcttaaattttatttatttttatttagggcagaccacctttatagctctcctaaagatgtctctttctagccaaggtttggaagagcaaatacaccacccaaagctttttgaggcctttcccagccctctccgcacactcttctatttttctgtttcactttcctttacaggctccttttcctttggctttgcttggtggttaagtcaacgagtaaaaatccacattgatttgggcttgttttataagtacaattcagcgcatttctcaaaaaccacagccacctaccatgtcttaacttgtctacctcgtccagtgggaattgtttccttcatggtttaatctttaagcttctaatggactgaaaataagggggtgcccccaattacaggtgtttgtttcacttgaccgtcttccaacgtggatagaattgtaaattgttctcattcctacacacatgtgagtcaaatttgtctttgttttgtgctgagatgagtggcttagtcatttacagaccactcagctttgttatggaacattttatacctttacctataataccttatgattgtcaaatagaaggcgtgtcagaagatatatttatttttactaaacatagaccttactgtttttatgtgcaattgactttgaagcttaattgatggagttctatccctatttggtctcaaactcagccaggaactcaaaaatgcagatttttccttataatttcaaaaacaacgttctttaatttttgtgaagtctaaaagatgcaatgagtagcaaattttatttttcacttgtggaaggcaactttgtagaatcaaaaacatgaattacaatcttgaagtttcaaaataattttttgtttgctatcttcaggtatgaatgcttatttgatatttattgtatttcatgtattgatgtttattttcttcttgtcctatagcatctgaggtacttagacctatacatgcactcccttacacatacaattccctttctctttctcacacactctctctcacatgcatactctcctctctctctccatctcccagacactctttcttctccccttccctctctctctctctctctctctctcacacacacacacacacacacacatcctctccctccctctctttctttccctcccttcctttctctcacacatacacacactctccctcctcccttctctcttctgtcatacagactcactcacacacacacacacacacactcagaatttttactttgttatatgaacttcagtctgacacatcactactgcttttgccgttcatctgttacaatctatttctgcacaagttcttgagaaatcagaattcggggcttttaaaaacaactttaacctgcttcttttgcacctaatttgtactctttagcctcaacacaaaaattttttgatcacagatatgttaatggatgataatgcctttaaatagcaccttatgctgttatgcattgcttttagaagaaataaaaattctgtacctgcgttattatatttttccattgaagtagttgttgttagttgctacatagaaacttgttatagttcttttttagtcgctacgtattctcaaaacctgccacactcccttgtcaagtaatatcagagatcattcctgataagtctaatattagaaatgtataagtagaagaatgacttcagttctattaagatggtctatgaaagccacattgattagtttctttctttaagaaaagtcaaagaatcttaactttttctttccatttcaaaaataaacaattcctttttaattttctccttaaacaatactttttgttgatagaataatgagaaacctattgggtaatctttttttaagcccaaatattgtaaccaagctaaattcaacatgaagtttaatttacttattgctagtttgaataaacattggaaagtttatcagaatatttagatactgttatttaatttagcatcttatgaaatctgagactgcttttggactcattggtttaccagtccaaatgggttaagtttcatatgtgaaccaatttgtttaccagcgatagatactagtgaatacaggaggcatcatatgaacagttgtggtcgcttttgaacaataagtttaattcttatcttttttgtgagagaacgtcaggtccagccaagctggagattgcaaactaacagcacagacacagtaccaggtggtgagtctgttgcctgttccatttccttggatgaacctggctgtcctgcaagaaacaaatatcaggtgacaggacactctgaacaacctcagagaggctacccagaactccctctaagttagtatttcctcagcaccagaggcaaaccagaatattgggaagtgacggtaacagctaaagatcaacaacaaaaatgagaattctcaattcttgtggtttgtagagaggatgtggaaggttgaacttcactggcagaagccagtagaacctaatcattcacccaggagagaactccgtttatagtcaagaacatgtcacttctatctcagatggtgctcttcagcattgcttttgatattacttgcttttattacagccccagaacctcagactctactgccatcacagtcaacaataggtaataaagctttttttaatgagtgaaaacaaagtatctttaacactctccatgttcaactttgttcagctttgggttttgtttttttttttttttcttctccagatgaagtttcactctcgtttttttgcccaggctggagtgcagtggcgtgatctcagctcactgcaacttctgcctcccaggttcaagcaattctcctgcctcagcctcccaagtggctgggattacaggcctgagccaccatccctggctaatattttatatttttagtagagacagggtttcaccacgctggccaggctggtctcaaactcctgatctcaggtgatccacccacctcggcctctcaaagtgctgggattacaggtgtgaaccactgtgcccagcctaatatttcttaattttccttcagatctttttccagccatttttgcccgaagatatactctcagcctgtgcttgacttagcagtggttctgagacacccatgaaagcaatactaattttaatttgatagattctttattctccttcaattacatttgaggaatatgccctgagcttgttctaacctgtttattgccagggaggaccctgactttcataggatatatttatgttttctcttttggaggtgtttttcttactttcaaaactctaacttttgcagattttcttgaaaagtgccacggactaggaaatccactcaaagagagaaatagaaaaaccaaccccaatctttatagcttctttttcttcaaaagagcaaaaaaaaaaaaaaaaaaaaaaaaaaaaaaaaagtgttctaatgccatcttagccaattacccatattttccttcataacatgaactgctggttactttattacagtcacatgttccaagtgagaatcatgcctttttgttccatttctctttccaaacttaactgactggctacatttttttgttcgctttgtcgaaaacacaggaatctattgaagtagaaaagaaactttgcatgtggataaaagcttcaccatttatatttgctcaatctagtaattaaaaattaagcatattccatgttttaaatacatgtcatttttcctttgatcttgattctttcttggtgattttttcacattgtcttaggacctgaaacaccaggaaccaaaccttcaacaacattaggtaatagagtattgagtgggtgacctttgtttcttcttttcctgtctgctggtatctgtgttgacagactcacattaatgaattaatacattaatgtccctttgtgtgtgtgtgtgagtgctctgttcttcagaaaaaaaagttaattcctataggtatagtttataaactgtatctcattttttaaaagttgcctgtcctgacataattagtgaatttaaagccttctgcatatattgttgatttgtggatattttaaatgctaagtgaaaaatttatctgtttaaatcttaggccaaattttaatttttatcccaaatggctttataaaagcaacctttctcatgttcctgttgaacatatgccttcaatatttttgagtgactatcttctctaagctgtacaaagttttgagattttccatctcaaaatggaagaacagacagatctcttggacagtttattaatctgtgacaaaaaaattattcaagacctcatttaactacataaataatgatagaagtttgcaaaacagatggaaacatgtccacagtaaatcaaagggtttaaatgtccttctaagatggatgtaatatttatcatcagtttgtaaatccacccttcttgtattaacttgctaattttctttcttcagcaccacgaaagaccaaaagaccaggtcgtcgcccccgcccccgtccccgccctaaaaccacacctagtccagaagtgcccaagtccaaacccggtaaatgtgatattcaggttccaattaacatagaaagtggaatatggcagcttctggtttgatatcagctacttgagcaactgggctttaggaaccagtggaattgacttttataactgagcatctgtactcagtttctatattcattttatatatgtaatattttatataatatgtttatactctcagtcatagttattaggtacacacagcagaaagctggcccattaagtgaattattaaagtaaagcaccttgaaatcttatgatgtacattcatggcagatgaggtgtgggaaagcaacaaggagaaaggaaaatgggaactgtaaaagggaaaatcacattcagaaaaaatgcatcatttaggtagtgtcccagcttgaggcataatgtctccctcctcacgatgccacttcttgaaatatttcatgtttttggtatttgcttctgtagctctggaacctgccacgatacaaccggagcccttggtgcccacaactggtaattctactccctccaccacggctgctttcacgggttgtagcttttgctttccccactctccattacaggcatgactgcagttccaccacctcatcacagtttcatcccacgcttttcctcacctttcctgtctgggtctgaagatcctaaagataggagagttctaaaacaatccagtgtgctcatttagggaaggtctgtggtcttggacacaacttcctggttctctgctgaccttctgtctgccctatatgtgtcgtggggttgagaaagccatcaactccttctcagacagggacctctgtgctcatcctgaactgaacaaatggcaaaattttactccagtgccatggttagcatttcattgctttactgattcaacttctaggactttcttctttttaaaaagttgcatgaaataatggcttcttcggctcttctgtttctttgaaaaatgtttttgaataggtatggatagcgagaggaaccaagatcgttcttgatctagaatccaatgtaaaactagtgatggtctttggaacttgacagcattaaaagtcccaaactggttttattgtttttagtactaatactgtttgattataatcatttcattatagtttcttagcgctcaaaatctatcatggctttactttgggaaatcccagacatcggcagccatgtaacattatttctcatgtgtaatttcaaatgtttatggattacttccagatcgcctcctaagcaatcagatttctaccttactgtttgtatactgaagaaaaccttttgatcaaagacatagaactaatatactttgtctattttgaaattatttatataggaaaaatgtcttatgactgtcctcattacttttgctcaaaaacacattttgagcatttagtaattaattttcctttctggaaaaactaattatgctagtgtgtagttaaaatagacactcttttcacccttcccacaccccagaaatgtttatagattcgttgaatttatatagtgtctttgttctgcataattgtccttaattttgacagtcacagccatgacccattgtggtaattttaatacctttttctttagcctcaaaaccatctgagagacctaaaaccacacacagaccagatgcacctcaaattcagcctggtaatcattactttcaatgccttgatctataaataggaaaacaatgtgtaagtaacattaatctccacattcacagctcagccgtaacactaattatggcactctaattttcttcaggttcaaaaccaccaaaacaattacttcctaaaccccaaaccacagcagaaccagacatgccaccaactaaatccggtaaacataatttccagtgctttagcttaacaggattttctttggaaacattgctgaaaatgtttccaatctgtcatatcatataaatcatagaaatccaaataccataattttgttcattatcttctccaagtagccacactgatgttttaagtgctaaatgaaaaagtcaatatgtaggaaattagtaaattttatacctgattgactggcatttcattttcttaaagcttttttaggcctattttctgaatttgtaatgaacagaagcctgagttttctgtatctgaaacatttttgaaagtcattttagtaaccactgttagtacacacagaaggctgacactgttcttcatttataggcacaactgaaaagaagacttgctagtcagggattagcttcctctaaaatactctattgacattttattttattctatttatttatttatttagagatggagtcttgctctgtcacgcaggttggagtacagtggtgcaaccggctcactgaaacttctgcctcccaggttcaagtgattctcctgcctacgcctccttagtagctgggactacaggcacccaccaccacaccaggctaatttttgtatttttagtagagacgggggtttcaccatgttggccaggctggtcttttgaactcctgacctcaggtgatccacctgccttggcctcccaaagtgctgggattataggcatgagccaacgtgcccggccaacattttaaacagtaactgttaactgagtaattttctaccacataagaagatatttatataacagttctcagaatccaactgttttgcagttgaaattttctcccaagattccaattagtataaaattttaatttgctaagaagcatctcacataataaataagcctatcaagaaggcaatttatattaatttagaataaactagactctgtgtcctctgaattaaacaccaatgagcacccaaaagtttagacttccttgcttttattacttatatctgtttattttttatgatgcagtctctgagcctgttccatttgaaactgaagctccctcaatgaccataggtaatgatgctttcttccttcttggccaatgtttctctgagcttgcgcctctcatctcttttttcattagctataatatgcacaattgtcattcaccatttttgttttcatttttaaaaattttcactattttcaacaggggcctttttaacatcattaggcatccttacatctgctgctcagcttgtaacacataattgttattctttcttcgatcacattcagagacattcagattgcttgagtcacagtcactctgtctatatccatctttcaaaccagaaaattttttgaaacctctgcttctttgtgggtacaatttatggatgtgggaggggagcaatgaaaaagctggttggagtttgtcctcaatgtgtttataaggagctcatgatggtacataactgtttctttctcacaaaagtcctttcttcctgttccacattattcatatgcaaattgatctttctgttgctaaattcatcttgcgatgcaaaattcccaacaaaataaggattctctgttttgtttgaaggcaattaattataaatattgttgtcatcctgttgtcctgacttcctccatctcttctattatatatgcctttagttctgaagatgctctcagtggtggcttaaaccaactttgtgctatgatgtcttgagcaataagagaaagtcagcctctctataaatgcctaaagagtttttgaggatgagatgtttgaatgttacatttagccttctgggtttagtgaaagataaatggagatgctaataccagagagttacaattcttgattaattttatatctatgtataatcaatttcagaatgttatagaaatcctttatatctagacaaaaagttgtattattaccttttagaccttcttcttaattatctctgttttctacttgaataattatctcctaattagcaatttgaaataaatgaataaggaggcagagtaagaagcaatatcacatttattacaaataaaacgtacaagacttttgcacaactctcacaaatctccagtaaatagactgaaaacatctttctaattctcctcacaactaccactctcaaaacaaattaataatggtggtgaaaactttttaaataccaacagaagcttttataacaaatttttagagtactttaaaattatatattggacaactaagattttcttggatccaggttttttatgttgttggaatcagataatgaaatacagaaaaatatttttcattgcccttatagggatgcaaagggtatgggtattttgtgaaataaatggatatgatagtttggctacttaggggaaaacaaatactattttcccagagttcagaaatgtatttaaaacattaaagggttaagaagattcattttcaaaataactttgtttttctgtatttcttaatctccattgtttattgtattgcttttggttagttcccaccacagacattgagcctgtaactgtgagaactgaggctacagtgacaacattaggtaatgacctcttatgtctttaagtatgagttttttctgctcattgtctagtctattccatcactatttgggctaagggttttttctttcataagattttctcatcatcctcttgtcattgaactatattcttcattttgaatgtattgaaagtgcttaaaacaagttacttggttataagcccatacgccactagtgaacagcatctgtgtcccatttttcccatattatccagctttattaatgcttgacagagcctgtgattctgctccagtagtgttctatgttaaaactgaatttcaaatacaattaggaatgtctgcctgataaatatcaattataattctgtgggcatcttactttctgttgttttaagatatacagagaatttttattgtctaccaactattttagaaaacaaaatgtgtttatactaataacttgtaatggaatgtgtgtctgagccaagtaatttcttagtacgctctcccaaaagcaggcaggcctgggtccctctctgatgtgatgtctacgtgcctatgtctgacttcccttgggtctgggccctctttgaaaatcctataccagcaactaataataaagttgcagtttatttttttaaattacatatattccatctgtctcaaaagacctgtcagtagaccaaaaatacatatttttgcatatagatgatcagaagaaaattctaaaccaaagagacaaatttctcaagacttaggaaaactttagaaaacctagaaccatgtgtaatcctttctttggtttctggagtcatatgactacaataaccagtttcctttctttagctccaaaaacatcgcaacgaacaagaacacgtcgtccacgtcccaaacataaaaccacgccacgcccagagacactgcagaccaaactaggtaaataatatgtggttccttgtccctgtggcatcccattggatgtggcatgggggtggcagtttaacatgccactttataacccacttgacccttggggtgaaggcccaagtcatggaaagcagctgctaccaacacagtgctctggcgatacctgtgacttcctcattctgattgcgtgaggacctccttggtgcctgggaattttacttgcttctctgacattcaattacatttttctctttgattcctcagctcagcaaaaactgacctgattaggtgtctagttagcatatttagttcaacctgtcacacattttgaacgtttgtatctgtgaggaatattttagaaaaaaacaaatgacttacctgtgtgagactcttcataatagatatacaggaatgtgaggaaaagcaaatatttattaaattttaccaactgttaggcacatcgttaattcttagagaagcaaaacatctgtgggctgataagtgtaatgtgaacctttagggagaactccatttctacaaaaaatttaagaaaaactagccagatatggtgatgtgcacctgtagtcctaactacttgggtgaatgaggtgggaggatcgcttgagcccaggaagtcgagactgcagtgagctacaattgcacccttgcactgtagcccaggcaacggagcaagagctcatcttgtggaccttgaaatttgtagagcctgtagatttattggtggatgggtaggaatcatataaacagaggcaggaaggtgtcgtgtgagggtgacattggaaggataggaattgcaagtgcaacctgattgtaagaaaggcaaagttcttttagttggacagtaatgctgcttttgatgggtctacaaagagcacttcgaatgcctgacttcgatgattggatttgagccaattggctccagcacgctctcctaacctagaggtcaggccttttctctcctgataacaaagagatgcactaacaagtttgatggattgaatgaccctctatatctggttctttgtatgcctttatttgaacagaggtcttggtctttttccaaagtgcactctcaacaaagaacagcattatctgttttagtcattcatcagtgtatctgcttaaacatatcagtaattgcatctatcatgaactagggctttgttttccagtttatagtgtaactacactttcacattagtttttcctaatttttaaacataacattattagatgtcctaagatttttctaagcagtgttttctactatatcatcagataatataaaaataagaaaaactggtagttaaccatgttacagatgctaaggttatatctgtttcataaaagcaaataaatatgtaccctcacttgagaacttcaaaatgtttgctttgtggctatagaaccaacgctataatggtaaagttcacttttcaagagaatgatggcttttctcgtgtgtttaacatttatttctttttaaaattgcttttgatcatttcttgctacagactttggacctattactcctgggacatcttcaggtaatgactctctatgtccttcagcaagtcctttttcttactcattgtcagattttgctatggtgctatataggctattgtaccatcttttgttgtcatctcattacagtattcatctcaaaatatggaaagcttgctttttaaagaaatatgcaatgacttaattcaagacagctatctgctccatagcccagcttgaaactgtgtcatgtctgagtctctgaacaatactcttagagccaagatccaactacaattccccatatattccttatttagagcaccaacgtagtatcaaatgatatcatgaagtttctttatgcacctttctgtttttcaaattgtatgtaattttttttgctttattgatgtttctgtgaattttatatacttagtctagtaagttaccaagtggaaaatttgcccaagcctagttatcttaaattataagtgaatagtgtagggttggttagaacctctctcacaccatcagagttaagcagtgatttgggttagggacactttcaagaaaataatgatagtttctaatgtttgtttcttaaatgtaattgtatgtacaatatttgtctctggagaactttcagttatcaaagaaaacctattaagatactgaaggagaaaatttcaaacgaaaatgacaaagttctgtcaactcaaactctaacaagtattttaaaacttagagctatgtcatcctattcacagtgaatggagccatcagcaccatattaatcctaaattttcttccttcagctccaacaacaacaacaaaaagaacccgtcgtccacatcccaaacctaaaaccacgccccatccagaagtacctcaaactaaactgggtaaatatgtagtttctgttttgtagaatccaagcagtctaccacggttgggactgtaagttctatgtacatataatctattgtgttgtgccctatatatctcttaagagtaaaagctactggttagtgaggagaacatgaatagcttagcatctcttgcttcctttatagggatcttctctgctgatgattatttactcttcttgctcttttatttcattcctgtcttaaagacaaagctgctcagtattgagccagcacaatcatttaaatcaactacttttattaagtcccttctaattccccaaagccatattagtccatacatcagaagtgggaagaatgttttctttcccaatcagtttacactgtagttgtaaacaaaagctgttcctgcataaccagttagaaacgaatatgaggcagcatgtttatgcaaatataatttattgcattgcataaatgccacctcctagaagcatggcaaatatttagaggaggaaaatgtccaggataattagaaaccagcatagaaactggatgagtagagggatgagggaacagaggctgataagcagggaatgtgttgaagttggctcaccagacagaggataactcgttgataccctcctgttcagtgatgaattaaagggggctgggatgtctactcaagagcttaaatttgatctagggggcttcaatgatccctacttctgcacaggatcatgctttttctgttcttagaactgaagatacccagcccaatgataccaaaaactgagagttggttcttcagctacttatgttaagtaaagctgtatttactaaagacttagtctcttaatgagtgtagtctcagcttccttttggctgttaatatgtgtggtgcacaaactctagggcaacctcccagtgattccctgctcctggagttaacacctttatataatccatcctctcctcctcatcctctctctttccctccctgtctctctctcccttgtgctagcatggcagacacacccccagcacatgcacctattcaacagagtgacacccatcacctttgcctcattttattggttaaaaagatgtcagagatccagcacacactcaaggggaagagatgactcaaaggtgttaacaccagaggcagaaaccactggggatcaccataggggctctctgctacactgtgtttgctttcaaatgtaaatgtttattctatctatcattattgattactgcttataatgagtgctctttggttttttggcttccacagaagttctagtctttaccatatctttttctaagaaaatgactagccagattttctagtgttcattcgaatcatggttaaccaacaagaagatcttactattgacctcagtgagatgctcagcgaagtccaaaggctattgctgactgtcttctgagtcaaacgagtacctgattaaagtttggagaaatattcaaaggaaaaaaatacagccactttcttttgagttatgatattaagaattaattttgcagccttagaaatccgatttttggtggtaagatgaatgttccaacatttcatgcattcacaaaatctctttggtttcttttattacttttgatcagttcctgccacaatcctcgaaccagttcttagaactgaggcttcagggacaacagcaggtaatggcacattatgtccatcaacatctgcctctcctgctcatttcaaacccattcatcaccatcataaccacagcttctcccgcttcacaaggcttctgtgttatcctctattattcattacttcttaatatgtataagagtattaaaacaatttcttgttggtaaaagagccaagcgtgaacttagggtcggtttatatattgcaatgtaatgactttgaattacccacatcttgcccccacataacattttaaccacattctttgttactaagtttcaaatataatcactggagggtggaggtgaaggtgtttgtccctgatctagactgagtaaatcggcacagctattacggtgtgacatagttctcttgcagatcttaatttctacatttttactatctgcattttatatatatatatatatatatatatatatatatatatatatatatatatatatatgtatgtatgtatgtatgtatatgtatatagccatttggggtaagggtgtgttcttgtttcagtaaagagtaaaattttcccaagtaaagagtaaaatatgcccaaggttggtaaatttaaattgtaagtaccatcacaaatataaaatcaccctatacttacccccatcaccgccataactcagcaagattttagaacttgttcttcattcaggaatccctgtgagaagctccttgaaatatcatcaataaactcatatttctatgtgatttttattcttcagaaaaagctacatgataaaaagagacactgtattgaaataggggcaaatatttcaaacccaaaagaaacatttcttggaagtcaagaaattataacaagtataatcttatccacagcttccggaaccaaacacgctgtattaacctgaagttttcttcctttagctcccaaagtgcctcaacgaactcatcgtccacatcccaaacctaaaaccacactgagtcccgaagagcttcagactgaactgggtaaatttgtaggtcatgcttgaggaatcctaacagcccaccccagtgggacccaaagagaatgaagtagctgggcatggtcagcagctgattccacatcagactaggcaatgaggaacagggctggggagatgacgtggtagccaaattccttatgcttctctctcagcatctatttaatttacttctcattcaattctcttcatcctttcaatgttgaatatatgataaagtgaaacagccagagaaggaacatatgttcatgcaagtgggagattatttcttgttaactataggagtcacgtaagtcacaaataaggatctaaggcaggagttggcaaacattttctagacagagccagatagtaaattttctaggttttctgggccatatagtccctgtagtattttcttcttcttcttcttctttttttttttttaacaaccacttaaaaacagaaaaatcattctcaggggaaaatcaggggaagagtaatagagaaattcagaaaggcagggaatgtatggaaaccagcctgaggaggcagtttctctgaccactggaggctgtcaggcttctaggtgttgatcagaacatttcgttgaggtgtctgcagctaagtgagaaggggtcttgaatgctggcctgaggagtttggattttaggtaggaatcatctgcatccctgtgcagtcaggctttctctgggtgttgcccagctgtataccacagactgaggggctggccctcttcttgtcctctttggtactcacgttggacaaagctcatggtcttgttccaaagatgagttttcagcaaaatgtgtatcatctactatgctctattagttaggttcagatcaccaaagaatgagaaaaactcctgggacacttcacatggaccgttatctgaattatctgactacaaagtaaatggccattcttcctaagagatgaattggtacccaaggacagaggtgtcattttctcccagctcaggaggctaattgtgtttgcttcgtgctctggacagatatgtcatgacctcgtaaaattctttttgaatgttctgagtttttataaatttttaatgttttgttggtgttttatttttattatttttggccagttcctgctacaatctttgaaccagtttctcctataaaagaggctccagggacaacattcggtaatgccactttttgatcttcagcaagtgctttttctgctcactgtcaagcttattccactgtatattgccattcaattacatttttggttttgtaacggttgaacatgcataaaacaagttgcctcttgctcataagagagctacatctgaatctagtttgggatctttcctggtctgtaacttaaaatgtttatcatatcattttgtttttggcttaaccagagttctctattaagggagatttgacatattctcgcgaggttctgacctgatctacgctaaccaggctgtaacacagaagtttcttaatatatcccttatacacctccctttttatttttttccttttttgggggtttatatttttgtttgtttttttatcccacttgcagccattcccaaacatctacctttttaatctgcctgttatttttgttattttgttaatgtatgagtaatatttttagtgaattaatcaacagataatgtgatcaaggctagtagatttaaataataaactgtatccttagtataaattgcattccccctagtctccatcataatctggatgatttataacctttttaatccaggcggggcactctacagaatgtgataaacatattaatcctaagtatctgaattaataaatttatttaatctgtcaaatttgcatctttgcaaatttgttattgaagtatcttaaataacagaagaagataaagtatagtaggagcaaaatttttgcattagaaagatatattttctgaagttcaggaaaatctaccaagctttggaaaagctaaagattttttttaagtctatgatgtgcagaagcataagatttaaaataactaaaggttatctttttctacctccaaaaaccttccattgaacatatcatgcacagcacaaacttaataccactccttgtctggctactcttgagactataccagataagtgtagggtctttggtttatggagcttaggagcctgtcactgatagaaataatagactcacataccccttagtgagggcgtccagagggttgttaccccctcatggttgacaaggagtcagtttagaagagacctgcaggatcttccctttttgtagtagaagacatgttttacttcgcagtgtgcaggctagttgaacacaaaaacttcccacgcgaaaagcctagagaatgagaataagccagggtgtttttgcaaattaaagatttttcttgggaatataaatgttaagtgttagacttattgtagggtcttaaagtaaaaaatgaatttgggtttcaacagagccaggaaagaatttgggtcttgaagtcacatcacaatttgcacaaataggaaggtaagaatgaacaaagataaaaaaattggatataaatagaggcgaccagaaagggcagagatcctgcttctagggtcagccaaaacatttttgttgataattctgcatttggatgacaccgtggaaagtggacggagggcttgaatgtctcattcattgagtctgacattgttctcatgagcatcaaaagtctttcttccacactagatcatgttttccctctgctaagtgtagacaataatttactggatgccacagactgagtggccaccccttacccagcctcttgagtgcttttgtttggacagaagtgaaaagttctttccaaagtggagttcccagcaagatcatcagtcatttttagttatttgtgtgatgaccatttggatatttcatcactttttctgcaaccataatttgataaacatatagtacatgttttctttattcagcatcactaaagtgcaaattagtttttcacgtgcttcttgagaattattagaaacatatttaagtaaatgccttaaaacatcctaaagtcttccatattatattcagataaacaccataactacaggaattgtttgcctcatgtagtgctaaacagagaccaaagatgatgaccatctcatgagatggtgtacttgatatagttcagccaagtctagacaaaaaaaattaatttccatttgaaaaagagctgccattacaaagcagtataaattaggtggcttaaataacagaagtctatttctcacaactctggaggctggaagtccaagatcaatgtgtctgcaagtgtggtttctcttgaggcctctctccttgtcttgcagatggccaccttctcactgtatcctcacatggcctttcctctgtgtgtgcagctcatgtctctctttcatatgagtccatcagtcctgttgaagtagagttctacctttatgacctcatttaaccttaattatctctttaaaggtctcactatgaggattagggctttgacatatgaatttgatatgttgggggtgaggggtggaaatataattcagtcctaatgcccttcccagaaatgtttaattatcctagaggcagtgttacacaagcaagatacgttttgatgtgaatactatagctcccacacattttttaccatctcttttgtttatcttattacttcagttcctgttacagacctcgagcctgttacttttagaactgagatccctgcaacaaccttaggtaacgaccctacaattacctggctgtttgccaagtgcttttgctgcttgttgtacagtccattcagtcttcatccctataacatggcatgtcttcctctacaaaatagcaaacatcactgcctgtgaccattcaactatttctatcatctgaagaatactgaagcctcctaaaaacaagtttcctgctgtttttatgagagccaggcatgagcttaactcaaaatatttacctgccatgtggcacatttgaaattatcatgtcatcctgtgcttcatttgccgagttctatattaacattgagtttaaaacaaattgggatctatttcttatctaagctgattggcaataacggctattcttactttcctttgcacatctgagtttctagatttaaaaaaaaaaaaatgcccagtatgtttctttctttattagtgctttaagtaatgttgtcttattactagtttgacaactagggaattactgaagtctgaaatcttaagttataagcctcttccttaatgtgactctaacttcctatcccttctcattgagtactctgccccaatcatttttttcccccagcaaggaagttctataagtttctcaatacaagtgctaatcttcactccttgagtgagcaactcgactgtatacatgaatttgcctgaaaagtaccatcaatgataaaatgacgcatcgttataaaaggaatgaaaaagtaaaactaaaaacaactaaagtttctggaactataggagatctgacaagctttggaaaaacctttcctcagtatccagaatcataagacctagagtaacacaaggctttttcttccttcagctaccaaaacatcaaaaagaacccgccctccacgtcccagacctaaaactacaccgagccctcaggcacctgagaccaaacctggtaaatctgtgattccttggtttaagggtgatccctggcagcctgtcgcagtggggactgaagcagtgtcaatgctgagcagcaacaggtcttattctccctaagcacgagggcataaggcatcatcagtaccatctcctctgctcagctttcaaggagaataatgtgtgggtgagacccaactgatgccagcatatcttattatttctatgtgagacttttctttgaaaccacatagttagtatatttcttactgtcaaattccattcacatcttaaaggtagaacttctttagcagagccaacatattcagttcaagaaaacataatcgtaagtgccttgcatattcccgttcccatgctggcaaccatgggtgatatgtcagctttaggagagttattttactgcagaaagcgtggagttgaagatatgtttgcctgacacaaatataaagcaatgatctttgtgttttatctcaaaagataagatcgaggtgggctggacttggaccttgggcccactgaggatttggatgaatggagggaagaatgaactagggcagaaggaccacatgtgttgggtcagctagaaaggcagtccagtctagatggactccttctagatggtcatatacgactgttgatgatggtgcatttggaagggtacatcaagccagatgaagaaggattttgaggacctgattcagaagcttagatttgatacagagacatcaaaagtctttgatttccacttattctgggctgagggcagacagatgctctaccgattattacaggctgagtgaccaccctgttctcttaggtgtcatggtttggacagaggtctcaaactctgtgtatagatgagttcttggcaagatgaacatagtccacttcaatgattacttttttatgtcggtatcaaacatatgaactgtctcttgtatccatgtttacttatatgtaataagcgctaatattcagaagtacagagtaattgtatcttttaagacaatttctaagtatatgtgagataaatgcattaaaatgttttccagtgcagttttccatatcagaattcattagttaaaaacataatagaatttcatgttgacttctttaacatactcaagatagttcaacagctaagcctgagactcaccatgcctatagtttggccaaatcatcaatgaacaaacacacattctttccttcagttaagaagttaattttttttttgtttctctggaagaattgacataccagtaaaatttgtttgcatgtgagtgttctaacttctcatatgtttaaaaatctctttgatttacatgttgttttggtcagttcctgctacagtcctagaacctgtcactcttagacctgaggcctcaacaacattaggtaacgttgatacagtgttttcgacaagcttcttttgcttattgtcaaacctagagtttcaatttgtttcttgagacaacagtgtcattcttgatggccattcaactcttcttgaaattataagactcttaactgttgtttttaagagaagcagtcatgcatgaatctacttgaggacgtttatatgccatataatctgcttgaaattgtcatgttattctgtgttttgtttaaacagtgtttgtgataaagctatgtttcaaacatattagtgggtttctaactccttcctggacagataaggctattaactctcataaagccagagaacccattgtacatctgaatttttacccttttttctatttgcatagatatttattgttttgtctctaataaggtcataatatgttcagattttaagagctctatagaatatgtgccaaaaattgaaagagtaagttgtaaatctcagatttagtggaactgtccttcattatccattaaaatttggcaatagtacttaacctttttggtacccagtaaagctaccctatgagattttcattaaaatttctaatctttatttctcaaattaaaaagtgatttttgtcttaaggagctttctatgataaaagatctataaggaggaatgcatgtgacaaaaatctcgaactaaaaggcaaatatctatcaagcagtagagtcatgtttttttacctcacacagcttccagaatcatagataatgcagttatgttgtaacccaagaacttcttccttcagcttccaaaacatcacaacggacacgtcgtccacgtctcagaacaaaaaccacaccacgtcctgaagcacctgaatccaaaccaggtaaactatgtgttcctggtttaaagagtccctgcagcctaagccagtagggtctcaagagtaatcccagtggttgggagtaaccaataggcccctgtgagagggaagctacaactcatggttagcagcagatcccactgtgaagatgtaagagaaacactgttaggagatctgtggagcaactgtgaatgcctcatgcttcctttgtgcagtcttttctggcactgtgcattttattaacttccatttatctcttaaaaataaaacttctttagaaaaattagacatattcagctcaagtcaacaaacattaagtgccttagatatcctcccaatcatattagcacatttggggtatacatcagatgtcagagatgcattttgatcctcaaacctgtaagacagttgagaacagaagcctttcctttgtaaataaagtaaaagatggtatggggcagtatctgtgcaaatacaagactggttttggagtgctatcaacaagatgtgcttggtgtgtaaatatttggatcagggaaatatagattaaggagaaatagagccttgaaatcaccaaggcacagggatgagtagaagggtgggaagaataaaatcaaaaggaaaagacacaagtagagaccaaccagaggagacagtctaactggacaactgatataaagatgtcttactttgctgggcgcagtggctcacacctgtaatcctagcactttgggaggcagaggcgggtggatcatgaggtcaggagttcaagaccagcctggccaagatggtgaaaccctgtctctactaaaaatacaaaaattagctgggcatggtggtgggtgcctgtaatcccagctactcaggaggctggggcagagaattgcttgaaccccaggaggtggaggttgcagtgagccgagatcgcgccactgcactccagccttggtgacagagcaagactccatctcaaaaaaaaaaaaaaaaaaaaaaagtcttacttcaagatgacaggcaaatcccttctgaatctcactaggaccatggatacccatggcggagatgcctaggtccttgatggagcagttgagatttgatctggtagacatcagcaagctgttctttccacatgaaggcatgttctttctttgctcagaatggaggaatatcctactcaattcatcatgctaaggcctccgtctctttccaaagatgagttcttagcaatacctacatagtccattttgtattattaattagataaccagagaatgaggaataaggaaataggtacctgagttaggtatagtcaaattttaggaaatcaactgtctacttttttagttttaacagtttttaaaggttgctatataattctataagctgtattatactagtaagactcatttttgaagaaaagttttgagtttacattcatttaaaataatcatttggttaattttaatgcttttgatcagttcctactgcggagctcaaacctgttacactcagaactgagacttgggtgacaacacaaggtaatagcacgttgcaatcctcattaagtgttcttccttctcatcgtcaaacccattccatcatcatagccgcagattcttatgcttttcaagactacatcatcattctctgtttcattccatcatattcttcatcctaaaagtattgaaaattctgactcttaaatcaccctttgtttttaaaagagccatgcatgaacctaactcagtctatgttttggctatgtaaccatctgaaattattttgtcatccagtgtgttttttaaccaatttttttgttaaaggtgactttaaaatgcagttttcttgattctaacatgattgtgataccagagagtttctttatgaatctaaagttctatttactcatttatttttgctatctatgtgatattctctgattgacattttcattaattatgtggtcttattttactaattgtcaaagaacttataactgaccaccaccactatattttagcagtgactcttgacctttttatttggtgagtcctattgactattcttcacttcttaatttagcaatttcattttagaatgtgacacttcctcccaatcaactttcttcaattgtaatagtgaatgtttctaattaaaaagttaaaaagacaaatttcctgaaatatgagaaaatctagtaagttttaagagatctcaaaccgtatgtcatgctactcatagcttcggagctacggactctgtagtaactaaaggttttctttcttcagctcctaaaacatcacaacgaactcgtcgtccacgtcccaaaactaaaaccacaccaagtcctgaggttcctcaaaccaaactgggtaaatttgggtttctggttaaagtagctcatcctagctgctctcaggaatttataactgatgccaatgatgggagtgatggcctgtgtgagtaccatgtggatgaaggcacaaaagatgtgctactgctccccctgttgagttagcaaaggagaacacagttgggatagatctttgtggcaggtgaattccttgcattttctgcatataggtctgtctcttactgtgtatcttatttactaattctttcttttttttttttttttttttttgagacggagtcttactctgttgccccggctggagtgcagtggcacgatctcagctcactgcaacctccacctcccggttcaagcaattctcctgcctcagcctcctgagtagctgggattgcaggcgcgtgccaccacacccagctaatttttgtattttcagtagagacgggtttcaccatgttagtcagactggtctcaaactcctgaccttgttatctgcttgcctcagcctcccaaagtgctgggattacaggtgtaagccaccacgcccggcctcttatttactactttttatttcattcaattgtcctcataaatacaaaaatgcattaaatagaaccaggcatttttatttctagaaaaaaaattaagtgccttctatcttcccacagccacatcaacaactgtgaggctatcacaggaggaggaagcttgtttttcacatcttactctgtagtatagtcaagatcaaaacctgtcccagtatgaaacattcaaagattgaagcaagggagtgtatctgggtaaattgaacttgttttgaggggtgctatacacatctaaaagcttagaaaaagaaaatgttatgaagaataagaataaataattggaaagaagttgggtcttaaaatcttaaagatgaagagagtcagacaggaagagtagaggcaagtcagagggcacatgcttcctgaaacacacaggattcggcttctaagtagtgatgacagctgaatttggaagggtttataagagcagttgaagaaagtccttgaagatatgactcggaagtttgcatctgacccaagaagcatcacccatctagggtcctgcacttttatgattagagagtagagagctactctgcatgtttgtcccttatcctgatttgctgagtgcctttactgcaaatgaaatctcagcctatgattcactttgctttattctttgctatgtcttctctcaaacaggctgttgactgtattcgtgctcatttagacacactgttaaagcttccacaaacatgccaacagttactaggacagttaaataagtatatatttggcaaaatgtctgaataagcttctagggcagtcttctacaatagttggaactaagtactcagacacctaggagaatattacatgggctttattgagatgtgtgccaaattgtgtaggctgtgactaagtgccttttaaaaaaattgtttatctggctataagatggccaagtcttcaaataacaagtatcaagtttcagaaaatttcttaaaattgctatatactgattgaagcagtattataatggaaagatataatttactggcttttcacaagtttatttcattgcttttaattagttccttctacagatcttgaacctggtactctcagaactgaagctccaaaaaccatgggtaatgagaatgtgtgtccttcaaatagtgcttttcctgcttattgtcataccactgtagtcagtttcttcttcatcataagaccatcctgtcattctttgtcatcattccattatagtctttatcttgaaattatgctaggctctgtgtcacattatcagctgaatttgagagaactgtgcatgaactaatatcaggacatcaaactgcttttaaccgttcaatgtgtcatgcgatcatgtgcattcgtttaaagagcattgaccattttaagctgcatttcaagcacgaatctctatcccttatttatgctgcttattcctcatcaattgtagggaagcacagtgtttctttgctcatattatttttcattttattaggatctgtgtaacattgatttttttgtttcaaggaatgatgtttttagtaaattgtcaaattgtaaaatgtacgtaagtcttgaaagttttaatgagaggcttccataataggatagactgactctttattcatctctattaagatttaacagtttcttaacttttactgaatcaaggaatactttgagattttgataagcacagtttattaattacatggtgttctttatgctttcatacatatgaactctttattgtatccatagttacttagacagtagttaacaagatatttatcccaacttctatagaagtgcaagtagactgataaacgcctttttcaatacagttagaaaagcatatattatgcaaatgtgtaaaaagcttgtccaacaatcttccactaatgtgtagcaagaatcagataatcaaacatctaggagaatgttttgttgaccacatagtgatattaagctgagtgcaatgctgtcttgcaaatctgtcttatgagactaatgggtacctgaccatggtttggccaaatctgcaaaaaacaagccttacttttaagttctgaagcttaaaaattgaactgtgaaattaatattcaagttaaatctttttgctttattttattatttttgtctagttgttactacagtccttgaacctgacacttttagaaccaagtttccagaaacaacgttaggtaatgatattctgtgttcctgaataactttttcctccttattttcaaatccattccatcattatcataatcacattgtcatcagctttgtaggactatcttgtcatcttctgctatccttcaactttatattgtccttcaactttatatttgagtattagtgatccttagaagttacctattattttcaaaagctatgcatggacctagttcagagtctaccatgtaatcttatttgaatttgtgtcatgtacttttgtctaaacagcattcatgtcactcatgtctgaagctaaatttcaaacacagttgctggtggctatatcatatctaaactgactaaactctaacagttcttatggtatcatggattctttggcatactcaaaagatttagtgtgagcctgagactctatcatccagagtttggctctagtgtttctgaagttaaagatgtatgagtctcttcacttttcaacttgattttatatgtaagttttctctctcaagaatcttcagtgattaagaaaattaacaaaatagaaaatattttaatcttaaaagacatatgacttaaatctcaaggaaatatgacatacctttaaaaacctaaagttttgtctccaaagccacctgcactagagtaatccaaagtttcttccttcagctcctaaaacacaacggacacgtcgtccccgtcccagacccaaaactacatcaagtcctgaagtacctcagaacaaatcgggtaaatgtatgaatccttggcttaagtagccaaggaacctgaaccctggcaggctgtcccaataaagtcctaaagaaatgcctatgacgggaagtaacagtcatcatgttttctaagaatcaaattatttaacatgggtagcaactgcttctcgtacagagctatccaggagaacatggcttggagccacttgtgtgcctgatctcctaaatgacttggtttggatgacgttcttggtccctctttaaagatgtgtttacagcgagattagcatactcatgggtatttattgctatatctgcattgaaacatgtgatccatttgttatgattacataaacaggcatttattttcaacttccaagaaaagcaacaagttactttcatatatatttctctctgtattttcgtatctgttgcctaaacaaatttccaaagccaaatatccatactagttagaaaaccaaatacctaggaaaacctcatgtggataatatcaagatatgtaacagagttcaaaggttgtaactaccttctttgatgaattgttctagctagtgtggccaaatcttccaaaagcaactatatgctgcctatcaattcaaaagttttaaaaaattgtgtatcatttgaaactcatgttttaaaataaaaattgaggattttttttaaaaagtctttaagctttcttgtattcatgttgttgcttttggttagtttctgttacaggctttgaacctgttgttcatagtactgatgctccaggaacaacatttggtaatgatttttgtgacttgcattaaatgctttttattgccatttaaaaacgcacttgagcactgtcatgaccagagttgcttctgcttcctaagacgctgttattccattctacacttcattttaaaatagtcagcagttttaattcaagtgttacctgttgtttttcgcagatgtccctggacccagtgaaggacagctgtccagcatgaaactctctttaaatttgcaccatatgattcagtgttaaatctgaggtccaaattggtatttagtatttatagatctaaatacccttccatttggtatttagatctataaagcaacaattaagtaccatgaactccctttgagtaacttagtttctataaaacctgtgtcttagtctcattattttcttcctattttaaggaataaggtgtccctattacattaaaatagatttccctgaaagttccaggctcctcaatcattgataagcttgaccactgttcttcactactgtttagtaatggctcttaatcttcgctaagtaggaatccctctgaatatctatgcatgttcaatatttattcctttaatcacttcatatgtgattttggtctctaaaggaacccttagtgatgatcagaaacaaagtaattttttttaatttaggaaataaactcaagaaaatctaacatgttttagaaaacataagtctacatacaatgctttcaatgatttctagacctacaaacactatagcaacctaagatcatcatcttttagtttcaaagacataaaggaggatgaataggggttattccatccctcagaccttaaactccctaaaccctctcagttgaaataacgaaaatctatggcttaggttttagaaggtttaaggagtcttagcccattgcacttgaatcacaggtatgacaataagcttgaatatcatttctgtgccttctgagagaaaaggcacttacagtggtcaacagcttgacaattacagggctcattattagattcatagctgagggagatctatccagtggctaaattcatcgtgtgccctacataaggactgtatctaacaaaggatcgatcttatacagttcttattccatttcattcatctctttctcaatggtgctgctacttttgcttaagaagacaatcatttcctcattctttgtgtacccaacaccatattaacagttgagtggggtggaataaggaacagaggtagaaaccaaaagaaaggacacattttacctcttaaagtacaaagtaatcatgaagaaaccctaaggttttcttagatacagttttctagatatagagcaatttcctcctatgagagttcttgtttaattgagtagtaaaaacaaaatatttacaggagtcaaggaacgatgtgggctgatgacagagagtagttggactttgaaataattataggatttggattagagggtggaagggtgggaacagcacaaataaaacaagtatcaatacttgtcaatggtggctaaggggatggtgaaactaaaatatagaacaaaacactcctagatgatattcaacattttgttaatattactgtcatgaaatcagctataggcagctcttagctcttgtaggaactgagattcagatacaatagtccatgagaacttaattttccaaataggctcctgctttttcagaaggacattttgaatcaggagtcagcaatttttttttttctgtgaaaagttaagcaataactattttagaatttgtgggctgttcagtttctgttatagctactcaattctgctgttttagcttgaaggcaaccaaagctgattcatgaatatgccctgaacaattttagttcattctatggctatgttccaataaaactttatttgaatttcatgccattttcacgtgtcatgaaataccacttttcattttttcccatcgcttaaaaaaaatgtgagaatcattattggcccactggctagacttggaagggctatagtttgctgacctctgctttaaatagggcacattctgtatggctctccataacctcatgattttcagggtctgtgtattttatttcactgctacctctgtctaaaacctatgaaataaataactgaaaattactcttacaattgagaccctcttctttcagctctgactgaactgcaaactcttattttgaaaccagtgacatcaccaagcctagaaatgacagaaagtcaacctggtaaatagattgttttatctgtctgggtatactgtgtgctttaagaggcatactgtaattctctaagttatatttccaaagataaaaaatgaaaaaggaatatacattaataactgtaaatattgcacaatgctcttttttgtgattccatattgttaaattagtaatacattaatattactatttgaatgtataaaaatacttttcaatgcatttgtatcattctagaaaataaccacatatctgattaagtggttgacaaaccacttagaagaactgattttattatttatccttattttttcaacagttacaagtttgtggctctctttaatagtaaattaaatttgtgctaaaagaacactagttcaattgtgaccatcaaggaaggagaaatttctcacttcagtaaaaataataaaatttccacaaaaataatgtgaaccctttaaaacatactgcccttcaagcttgtaaataggccaggcatagtggctcacacctgtaatcccaacactttggtaggccaaggctgatgggttgcttgagctcagaattttatgaccagccttggcaacatggcaaaaccccaactctacaaaagatacaaaaattagctgggcatagtggtgcatgcctgtagtcccagttacttaggaggctcaggtaggaggatcgcttgagcccaggaggtcaagactgcagtgagccatgttcatgccaccctactccatctggttgacaaagccagaccctgtctggggaaaaaaaaatggatgcaaattttaaaagtcagtattagtaatgttgttgctacttcctgacatttattttaaaacactggatcctatatttttcttccgtaggactgtaatttctttccatctcttatgagtatcttttaattagataaatgacattttggtactcatgttgaatgtacaaagtaggttgttaatggtaacgtacagtagttatcatgttgtgaattcagttcagttatgagagcttcccttagtgttaataatgttgttaccctataacagttaacattgaacacttactggatgcaaagcacttttataaatacttacaacctatcctttatcaattgtaccattttctgttttttactagtttctgatgttctggaatcggttacacttagtactgagtcaccaaaggagaccataggtaaaaatgttccccaatgggaagtcaagcatatgtgcttttccatctcattgcaaagtcatctctggatgtcctcatgctttgtgacatttcatagccacttgctcctcacagcttgtctgtgctcatccagtgggtcttgaatgtcattgtatacagcacattgtgttcacatctgctgtattgctatgcaagtttcataatttccttattctcactcgaaacgaaaattttaaccttttctgattgctctttcaatatgaatatgtacaacctacttttcattttcatatcacttttaggattcatcccgtgcttttgctctccaagtactcattctatgtgtgtttctaactggaattcttatacgaaaaaaaaaatgaaaatggaattatctgctttgttccaggtagaagtgctgttgactctgccacacattatgtatggggtgtgcatgtttcccacatagcacactgccttcatttcctgctttcatttctgccctcctaaattgtggtcatcttcataatctacctaaatgttaattattctcaagaatatatctgcttaagatagctcaattctatttttaaattaaatgcagggttctattacagtgtgctttgggttggccaccactaaccagccattcccgtttcttccctagcaccagccaaaacagactatgtatatcccactgccaaagcaccactctggccagaggagccaaagactgaaggtagcaaaggttttaatgctttgattcatttattccacacattttaaattaacatcagttacatccacggaatatgaaagttcaagctgtggtacttgattcacaattaaacagatttgaaggagctacagcttccaacattcttgaattcttaaagtgataattgactctctctgaatacagaaataaatttgtctttctctgctgaagtctaaaggttgaggcgtaataacatttgaaacccagttaatgacaattaaaacataaatattaattggaggattagtattatagaataggatttttctcccaattcttttttcctgtctaaatccattgtcctgtctgtaaaattatgatgcaaattattaataaaatttgatattcaaaaaaatgctatagcttaatatcttacagtttctaaaatttttctcctttgttttggtacagttgtggaatctattacatatgtatctgaaccacctgagaccacactaggtaataacctcggtagcccaaccctgggtgctctctgtcttcattgccaccatcgcctgagaacctctgggtctctctcattgtgaattcatgttacaccgtcactcttcgccatggcagttacttttctttcaaggtgctcctatccataaccattgtccaaaaatgtccttcctcccattcagttgtgtaacaagactttgctttttttctcttcataagtcagcagaactgttgaatctaaaatattttcttcctaacactgtacatcctgccagcttggcattgtgttgaatgtttcagataatgcttttttggtgcgatgatccatttatactttctgacctagcaacatactttccattaacacttatcccatcacagttatttatatttgtggttttcttctccattctttaagtgaaattcagtgctgcttaaatgactcatactataatatttttaaaattcctttttcccttcatgattcctattgaatatatctttgtagcattgttgaggaggtagagttctaatgtgaaatgagaactttagaagtactttgtaagctgcatctgcaaccatttttttttaaccaaatgcattatgaaggagtaggaatgctgttttgctgcagacttgcaattttctttattttaaaaaaatctatttgttaccatcctgtctgttatctgtactcaaggtctgtcaagtgctatagtaacccgcgtactttccttcaattaccatagaaacgtcgcctctgccttctcaatctataaccctacccagcccagatgagcctcagactgaacctggtaaatacattattttgtatgtcatatatgaggtgagtgtttgcagaatgtcagtatggtcacctcaagatatcagaggccctgacttcatcattctgcccacagactttgatgggtaatcctacctgtctgatgtcctgctatcattggtaattactcaaatggcagtgttgttctttaggatatggttgaaaaatacctctcagctactctgcaagtgtttaattcagggaataggaatgcttctgggaagaacatttatattctgttctattttaaaatatatatattctgattttaattctaattcatctcaactagttttacaagttctatgatcatgtaaaaagtatattaagctttctgatttgcttttgacattaaaagaaacctccagaaacaggtttgactgtgcaatccacatgaaagggggtgtactggccagtcaccttgtagttattcagatatctttcttctttccactcctttctgcagtgctttggccatttcactgcatacaaataaaaaaaatcaaaacaattattttggcttatcacaaagctttacatagtagtggagtttgaaatgattgaaaaataatcaacatgaataactaaatatgcttcttgttttaaaaagtcctcttaatagctgtaggtttcaatgtaatagaaggttataaataagcccaaacttctgttttgattggcattaaactatttttatatgactctgtttccaagggagatatggattttaagtttactcattgtctgctgaatatcctactagatgttgcctataaaccctacagttttttaactaaaagaaatccacattgactaaaataatgaaatcagtcagttatacctaacttttccaaattttgttcttaataactataataattaatatcattggaatgtctcattgcaaatactgctattagtgattcttatctcattgtgtatcatttttcatggaattgctttatgacatgcctaaccttcaggtggtctttcttatcctctggcaaagtaagtggcatatcagttagaaccttagtaagtagggtagttgagaatcagaaaatcacgaactgtgagaaatgctggaatgacagaattttaagattggaagggttctttaaaattgtgtaacttctgatgaagaaactgagaccttagacccagtgattagcaaagggagctctaaatccccaggttccaggcttctaaaccaggtcatctccaacatatatcagtattcatctctctacaggcaagaagattccactgaaaccattgtataccttgtattttttcatttagtatcaggaagaagattctgcagactccttcagaaacttctggtgtcaaataactcttattttcagcaagtttttcttaaggtgtctgaaactacatgacgttgaccatgtttcttcttacctttctttatcccaaacacgttttagttcaaccaaatgaggtgtttccataagctgcaaccttgcatctgataattcctttccttcagcaggatagatttttcaattttttttggtgaagaaaaaattggtttttacactgattgtcctagaatttctttcggatttgctcagcaaaggaataactctccatagaaaatatccttggtgttcaatttctcttccctctcttcccctatataaccaataaaattgtgttttgtttagtaagattaatttttccattagcacttgctattaaaatacattatatatttgggctataacatgttaactttgttttttatttagaaaacatatgtgtctgcatttaaaatagtacaactaaatattctgataaaattatatgaacttataataaggatgaattcttgtaattatgaatttattttcaaactatttagaaggtatttgatgtcaatatttctgcaatcccaagtttcattttgccagctgaacatcttagatatcatttaatgtgactttttgttttgttttctgttatataaaaaagttaccttcctatactttgcagatctttagaagccttcattgttgagtatttaggtcttcaatcactcagtaaacatccctgagcttctagaggcttaggtactgtcattcttgaagggctcaagatttccgaacctatatcctttcttttagctcccaagcagacaccacgtgctcctcctaagccaaaaacatcaccacgcccaagaatcccacaaacacaaccaggtaaatatatattttacattttagcttgaaaagtttgaggttagtggggttattctagcaaattgttcattaatagttatgatagcagattgagtctttaacacttgtaaaacaagtcttcctctgtaacctaataaatatttaaatttctttttggacttactaaaaaagtacatcattggaagagcttattccacaaagcttcccttaatgttgtgttattgaagatgagatggacatgaatggcattgcttaaaaagaatagcctgcctacttcgttttccttccccggcctgagactacactcctatcccttccactattcctgaatgtgcttccttctgccaatcatctaatttgaaatttttctcaatacatggcctgactacaacaaatgtctgaggttcacccacccaggataccggcaaaggaagcttcgcgaccactaatctagtctggggaaaggaaaatgtttagcaccatcacattatgtttgatccaggtagtgattctggattcccaccacaaatatttcactcatacctcagaatctctgtcattaggtactgtcattcttgttttgctacaggggaaaagaaaacccctgtagttttaggtgtggtctctaatatcaattgagggaaattttacctatcattaaattttttctatgattttaaatctgccttatttagcataattttaaatatgttctaattactaaaacttagctatgaaaataatttattctgataataaatatatgaaggtaccaaggcaatattcccccaaataatatgaaattttaaataataataatacatttgaaacattaacatactaaaagtctgagaaaataatgattagtgaataataatgaataggaataaaaacatcaaagttttaagaatataccaagttattaaataaaccaagtatattaaatttgttattataataggaaactaaaatctaacgttaaaaatagcagacaaaattatatgagaagaagctctcagctttggatttgagtataaagcatagaacaaaagtagaaaacaaatggggagaagaaaccatgaaaacttgaatgttgaactataaaagatgaaaaatactaaaaattaagagacttgggcatgaatcatggtcagtaaaaaatgtttaaggtaaaggagatatgaagtaataggaaaaatttatttgcagttttatctttttgagctgtactttgtacttactaaaatgcggtatagtaaatcaggagcttgctctaattttccattgttatactataagtttcaaatttatttcattttgacttagacttttagccaacctttcttgacaagacaggctcttcagaatagatagattcacatcctcagtgagttccactctctaactctgaaaccatggagtggctgccagactgtaatgagagagccttctgatgtcccgattgaagcaacttccagtccatcagcatctcttgcggaaagtagctgcaaaccagatacttctggctttgtcagtgctacttaatgtaagggaacaatttgaaaactggtcatgaaaaacaaaatgcattctacttattctttttaaaagtgggtagaattgggacctcctcatcccacaagaatatgattcttacgtaatagtttccagcaatatcctggatttttatagtctttcaaggaggtgtgtatatgtacacatatatatcacaaaatattttaaagacaaatagttgaatcctaatacttcttcccttatccttaactagttcctgcaaatttcaaaaagtcatttggacaggagagtgtcctgtttatatgcatgataccaatacaaactattgttgttgggctgtaatatcatctaacaatagtatttacaacttaaagcgcaacaaattttgttcatccaccacctttcacagaataagattctgtaatttggcatgtaacttttattgttagttttactgaaagtgtgtttataaattggcaacgcttaaatctatgtttggcattcaaaggcaaaatgggatctaaaatctgaaagaaagcataaggaatattttataagtcaataaagtttgacttcttagatcccagtgtgtataggtaatagcaatattattaattgtatacctagaattttttataactcaaaattatgggtgctcctagatttcacatgggcaaacaatgtgaaaatcagaatatactcagattcttcaaaaccaaatttgtgaagctccttgagaagtggaaaaaaaatttataatagtataattttcacatcattttgacatttcacattggattcttataaccatatcttgagttagggcaggtttattgtttcaccttaaaaaatgagaagcaacttaaaatctgacctgcagaactgggatatagagatcccaagtgtttagacctgttgataatgtttgatcctcagcatttggttcaagtcctgactctggtacttaataaccataacctcaagcagattatgtcacacacccgaatctctgtttcctcagctttaaagaggagctagtaattccttcctcccaacattatggtgagactcaaagggtgtaaactttataaaggcatttttgaaatcatagaatacactataattgttagacttattttcctggtgtctattatattagtaccttattattcccaaggaacagttgtggaaatctaattttagttgtcagcaaattcatttgaaggtttctctggagccagagaaatgcagggcgggtaagatgtgaaccaacacattccattgcattgtccacttaccactctgctgttgcccaagaggacttcaagcatatccatgttccataggattccaccctgacctcaccgtctttacctactttgtctttaaggaaagacataaaaatgggtttaaggagaagtcaagcaaacatatccagtaaagaaaagctctcttacattcattccattgtcatctcctctgaaataaagatttctaaaaagttgtcatcttactctgacgctttgtaatttgaaattttgcagtttctcggatttcactattatataattatctggaattctaactaacctatttctagagcttaaggttaggtcttctttctaactccttcttctgtcttctctctaatgctttgttttatcagtgttcaggctacaccttgacatgtcttatgttttaagcatgactggaagatgctgaaaccaaatgacttacaatatgagttctctctttcagttcctaaggtgccccagcgtgttactgcaaaaccaaaaacgtcaccaagtccagaagtgtcatacaccacacctggtaaatgctttatttcatgtttaagccaaatgcattctactgtcccactctgcttcagtgaaacatgagacttggtggaagtgaggtcaatatttcacttatgtttaaatcccatgttgtatcatatgtggtatgataatttcagaagtttcataagagtgcccactggttcatctagtaaagctgtgatcacagtcaaaaggcagagaattatgccaagggtagaatgtctttcctagaactaaagttctcttattccctgacttacaaaaaatgctgccaattctacgctatgctcaaatatttcactaaacacaaagataaagacttttgttctcccccacaaatgataaattagtgtttttacaaatggaggcaatgatgtttagccatttacttggatacataaattgtactatgtccacattgagttttttccctgtcactattctattttacaaattgatggagacatatcttgggttaagaaatttctttcacacacacacaatggtttctttagctacaaatctgttttttgccaatcatctgagaaggccttttgttcacatatggggaaggtaatctcatgtttgtggagtatcttcatgggtattaccaccactatttacatgaagtcttcaagtggccttaggaagccgctggtaactgaacaactttctctaaaaagccaagctcatttttaactagagaatctgggaaatactgtgagttttttctctttccttttaaaggtacaattattataaattcctaactgctcctaaaatcatatagaacatttccagagccaaagaatttctaagctatagtttaaaatgatagcattttggaagcaagcctgaattcacttcctataatgttttccagattgtataagcaaaggctattattgctgctgtggtatagtcactttggtggtggtggtagcaggctagagagaatctcctttgccctgaagtctagaatgtaaatttgtaccaccaaacacaatagccaatattataaacaggaagtaagaaaaaaacctcatctcacttgcaaaagatcagcttattttcaattgtggaaattaatttgttatagataacagtagatttgagtgactttatttacttttcctcttcagtataaaaaataatattagtataatctcattacatcaatatattgaatagttaagttttttcctcttttaatatttaatatttgccctactgggcatgagttggccattattgaagccaggtggtgagtacctaagaattcattctactatttttctattttcatatacctttggaatttactatcataaaattatttttaaggtatatattttaaaatcttctctgttagctagtccttctcttgaaccacattcttcaaaagttctcccacagctaagttataaagagcggaccacttttggcagaaaaaaaaaaaaaaaacttgccttaattctaccaacaccttgcttttcatacaaactctaacccgtgatcttgatccctgtaacaacacaaatagttaacaactatccctatttattctttttatccagagtttgaacgagcagagtaagagaactgcctcctggagaactagggtctctcttagtggtcttctgtcacctctccagctccacatgttcagagttaagtttctgtccctaaatctggtgttggccctgccatatgatcagggttctcccttgccccaggggtgtggcacccccaggaataatcataaggcaactcttaccacatttcagttttctcagaagtgttcaaacacattggattctgatgtgttcaaacagttctagattttatgtaggctcaaattcacaccctaatgaacccaatactttgtttaccaggtcctgtgggttatacttcaaaaaacagagggtaaatgacatgtgtagtttaatgtatattagtatcctggagaaataaactcttctgtaaaagtctaaaaatgtaaaaggtagtgctgaggtcaggacagagttatgttttattgtgacatttatctcaaaatgtattctgagagagatcagaagtaacaaacttcaatttcttgacctgtatcaaagaggaagtcagtctcagattcattgtacagcacttccattctatagattcctaggcataacaccagcttcatccggtgaggcctttagaaaaaaccttccagccactcagttgaattatctattacatttaatgaggaatcttgacaaatcgggcccacactccatgtccacaccaaaatgaaagtggcttttctccacatctaccttggaagaatgatttagaattcagataatatttaacttggagtctaaacaggaggttcctggcttaacagagttctgtcttccttatgagttcctttctacaccaagagctgtcttggctttgtggtcaaccttctgacccccaggcattgggataggtttcagtcatcaggagcaaaccaggaagtaaatctagatttcagcaagctatccaaatcctcatgaatgttctacgtgtctcttccctttggaaaattcttatgtgtagtcacactcttcaggatttctgtagttagttttatgttttcagttaaactggttttaaggggagttttttgtgaactaattaaaaataagtgtttaattctaaatatttcttaaaaattgagccttattgtttaaaatgatacagttcataaagcaatcatttgcttggattacatactttaaaatattgccagatttttattagggagaaacctgattggacattcacctaataaatgtattttttctgatatagtcttagaagacaatacgtttagaattgagcaagccaagataacaatagttaacaattatttccatttatactttttgtcaaaataggagttgggatgagcagggtagagaactgcctccttaagatcatactgttatcattacaattctacaatgtttcattatcatcttctccacattttgccattttttcctaaagcttcttatttttccccttaaggatgtactatgtaattttattctttgttaaaatagtttctttttttcaaacaattttcctagaggcaagatggatgtcttctcaaatatgagaattcaaatcaggagttttcagcaatttgcttatttgcctgatgatatattaaatatcagtatgcttttccctcaagttttagtgactcagtgccttcctctttgcctcaaaatctctttaagcttatatatgccattgatgtgattaataaattaattctttagatctttttttcttttcttttcttttctttttttttttttttgacaggatatcactctgttgcccaggctggagtgtaatgatgcaatcatagctcactgcagcctcgatcccctgggctgaagtgatcctcctgcctcagcctcccaagtagctgggactacaggtgtaagccaccatgcctggcctagatttttaaataatgttttacatttccctggaaaagaattagagacttttgggagaggtcaatttgagtctttaaaatgtttcttagcaaagtacaatgctggttcatgggaattgcccatcttttccagatttgctctaaaaaaaaaaatgcactaatgcatgttcaattcagcaaatattgattgccacttatctgcctggttccatgcttagggataaaatcaggattaaaagaattagatataatctctaccacccaacacagtgcagtggagaaaacaggaataatatcaataactataaaacaaggcaaatctcagtaattaatgggttagtgatataaacaaaaaatgaaataacagaaaagtaatacattctaaatgtatgaattagagaaggtattatcaagaaaatgagctttaagatagattttaataggcaagtagctattgatgatttttaaggaagcaaagattcagaggtataaaaagtgctccaggctgggcgtggtggctcacgcctgtaatcccaatactttgggaggctgaggcgggaggatcacgaggtcaggagaacaagaccattctggctaacatggtgaaaccccgtctctacttaaaacatacaaaaaattagccgggcatggtggcacacacctgtagtagtcccagctacgtagggaggctgaggcaggagaatggcatgaaccagggaggcggagcttgcagtgagccgagatcacaccactgcactccagcctgggtgacagagtgagactccgtgctccatatagctgagaaacagcatgactcagaatgactacattcctggccatatgatgagattattgagagatgaagacttaatgtaaattggattcatatgtttgaaggcttttaggttatgctaagcacttcaaattttttttctttagacaattaggagacattaaaattgtgtgtgtttctttttgtaatcatgggagtgatataattacatctgtattttagaaagatggctgtgatttttttaaatggaatattaacaggcaaaaaaaaaaaaagattaatagccaggaatcacttagtaggtttgcaacaatctagaaagataagtctgagaaattgaactaattgtggtagaaaggaaactaagggaataatgctgaaaatgcttttggatatggaactacaaagacctagagaatgactgaatgctgttatggagagaagggtgacaatgctattgctagactggccaactagtagataatgatgccgttaactgaaacagggaatagagagaggaataaagatgggtgtgtacatgctagccttgcaggaccagtaggactttgagtgggaagaccctaactgatggttgaagatgttttctggacttctaaacagaagtcaggatttggggcagagatttaggagctgtttgtttacatctagatagttcttaaatgttggataatatcatagaggagaaaatatagatggagaaaataagaaaccggaaatccaatatttaggcagcatagttatattcaaggagtaggcacaggaaaaagagcttccagatgttgtcaaaaaagataagagagaatcaggaaaggagttgggagatgaggcaggaaaaggcctaagaagagaaggttggcaatggcattgcagtggcaatgagatggagaggggtcagaagaggctgccagcttgactgtgcatgcccagaatcccactctctgaaacctttgggctgcatgcttcagaattagcagtttccagattttagaaacttacgtgagtacatataccattgattagaaacattaatatgtattcagtgagcagtatgaatagtcttcccaagcagaataactaaaacctataaacagcccttagatcagtacaagttatgttttgctattgaatagattaagagaaaactcagctttcagagtttctggacctaagaatatgatgaaggcactgttgcaggaaatgagtggaggctggaccacagtggatgaagaaaatacatctaaaaggtgaggaagccaaggcagatatatagtttttttattaaaggaatgagagcaagagagagggattgtttgaaggagaagccatgtcaaggaaatgattttttttaaagatattagagcattcgagctgttttgtaggtagaggggaagtaacatggagaaatgaaaacatggacaaatagagaaaaatataacagaaataatggaaagtaaaaggcctcaaatgagatagaagggagggtggcccaagagcacagggaaagccagcaggtagcctccaacggggcttcctctcagactcagactggacctaatggtacaaggttagaataaaggaatagagagtatagattaaaggaatagaatatggtatgtagtctatatgtcttacttttttaagagaatcagtctctttgtagcctattgccagggtaaaccttattgcagacttcatattctaattttatcaaaagcaaacacattaattattttctaactctatcaaaacattcatgcacattcatttacgtttatctatgacagacattgtgcattcctacttgtgttggcttttctttggagtggcacactttattcaaaaagacagattggttagtataaatggtataagttggttaatataattaaatctaaaattataataatagtaaatattattataaagaaatcaaaactgctttctcagaaaattgtcatcattattttcattgatgagtttctcccagcatgaaagatgtacgttttagggaccgtgctcttgttcaatttaacatacagaggaatgccacataggaaaaaaagaaaaaacaacttgaatttcttggagctgtagttgaccaagtaggagaatgattcatattactttcctgtaaatatttctatttctttcctttccactgatttcacctgcttaggaagtctgctatgacagtttattaaatcatcacttcacggttaaaaagaaaagtgccaattttagcagctggaatccacattaccccagcctaaattcctcagtaaactagagcagcagtgaataatgtatttacagtatggtggatttattagtaccacatctcttctcagcttctcctttccttaatcccagctcctttttgtttggtgtagtactgtaactaattagagtatttataaactaaaggctgctttgaatgttcatggccttcacagagctaaatcaaagtgccttcttcagcctcaagataaacattttgtttcatttacagctggaaatttctcatatgttactatttgaatcccaaaaaaaaccacatgcaaaagcaaaatgttcactattgtggtgggctttctctaccttatcaaccactaatctttttaaagtttccttttttctttaagaaaacaatccatattttcaaattcccttggatgttaccttttagctcataaaagttctgagtcaagtttctgttcagtgtaccagttttcacaattgtaatttcactaatacttagcagcctagtctaagaacagatgtggcatgcaagttaaacatgattcccaaaaacaataaaaagagattgttcattttatataacctatttctccactaatggtaaagtggtgcttggccacctcataataaaaaaaaaaaaaaaaaacagtttcttcatctttcttctgaggcagagttctagcctgaatcataattttttttccagcattatataagatgcaaggaaattacattgcctgacaaaaagacactggtgtgtatgaaaggtttagtgtggtaggaaaacctttcattgagagagtaggcctgggtaggtttgtggggaaactgagttgaagtactttacactatttgtggaatgagattttgttgcagaaatctggtactaacaaatagacaaatcaccctaatattttccccactgagaaatacggtaccaagtttccaatctactgtttaattttgctaaaatagaacacaaacattaaaaaatatactggatttcaggcactgcatatacgagtaggcctattgttcagctgacatttttgtcttgttttcatatgcttatgtcaagcatgcttgacacctaatatactggaagccacatcactaaagaagacaaaaatggcaacagctatcatttactaagtaacaagcactatcattaactttacatgtggtatcttctaatgactagctgattccttttgcttcattttctccccccagcaacggtaagtgccatttagaataagactgtgttatcttcttacatattcaagatttttccatttcttattgtttcccccaatttgtagccacttttgtactttatctaagatacatattttttgttgctgttagtggactttaagcatgaatatcaaacagcagctaaccactttgtgcaaaaactgactttctattttgaaagccacttgagggagctctacctcattgtttaattatgttagctatctcctcctcttcctcaaggaagacttcaaaatgaactgtgactgacttcgtttctgtttcactgccaccagaaccttccctgcacggtaacatttttccattttgaagaaaacaggcatcttctcaactttggtcattaaccattgtaaaaatacttttgcttcattcatgctttctgggatttttatatctgtgggttaagctcactccagttgggttatttagagtatgcagtgttttataatctttttctttcagctccaaaagatgtgctccttcctcataaaccataccctgaggtctctcagagcgaacctggtaaattaattatttcatccttctggctaagaagtatatttttcaaaaaaaaaaattcttgaagtaaatatatttttaatggttgtgatatggaagaaatttagagaaaaaatatgggtataaaatgcatatttcttgtgggtaaattgaatcatctggttgaaatatttttccttggtgaagtgagggaatagtatataggttcattgagtagatcacgctaaaattataaatatcattgttaactaagccaacgcttatatcctttcaaaatgtaaatgtagctacattacaactatggatgtacttttaagtaaaaaaaagtgggtgcctactcgaaattttccccaaagtgacagtgaatgagaacttcaaagttttagttaaactaagttctctgattggcatctaatgtgaagaattttctcttatttattacaattcttagagaacatttaaattattaaatcaatgcatctaaaaaataaggaaactattttgactttgccaggtagtaattctcataaatatgttcctttggcttgcttttggcatagttctgcagcctgttacctttagatttgagccaccaaagacaacaataggtaatggttttcccatattgaccaactctgttttctttgctaccatcaagattgcaggcctttctcaaatgatcctgttgaaacatcatttcttctcaatccattcatcatttcattctcattattattactctttccaaaacagaaaagcaattatttcagtgttgtaatgggtttgctttgaagaccaccttaagacattactgaatacatcttcatttacttcatctatctccatgtttcaaaatgagtccagtatgtttactaatggtgcccatttaacaatttccattggtttagtggttctcagctgtaatgtaacatactagtatgtggtaagtttgaaagatactgcaagtaattatcaatattggtcaaaatactgaaaattcccagtgatttgttacttgagtctactcaagcagactcaaggagatgataccaacaatgatgatattctcactcatttggtaatcatgcatgctctcttgaacgggggagagagggacagagctacagccaatagtccaggactgtgtctaacccacaccccatctcaaccagccattctgatggattggttcaagaacagaatgtcatgtagtatgtgtcctggtggaaaaacagttgagaaccatttttctaatattccgcagtcatttttctgaaagtcgtgtgcacacttaactttcttctttcctttttctacttcaaatgaaggaatttcatgtaataccaatctggtctggtgctggctttgaatctaaaaatttacaaccttggtccttttctttttgcagctcctctagagacacgaggcatcccttttatacccatgatttccccaagtcctagtcaagaggaactacagaccactctgggtaaatttcgttttaatatttgttcaaagagagcttgccttttaggaatttcccttaaagtaaccataatacattatgttcacagattttttctaaataataggttatttaaaaatccatttcactcaatacttttacattaactgtgtatttgtcctaatatttatgctgattttcaatataaaatgagaatgttttaacacatctaagatgtgttaaattggctctggtgattaagtgtgatttagaatacttaagaattttaagtattctaaaaagaaaaatgttcctaaatcaatgctgttcttttttgttgctttttctgtattttaaactgcatttgggaagaaaaattacttatctagtatttattaagcctttactgggtgcactgttaggtgatgcagttctaacaagaaacttttaaagaggagtccttacactagagggctcaccctctaatatgaagacaggacttggttataatactgcagcctctgtgccacccaatacactacatgcctttttaaaatgtaaaccatgtaactctgtgaagtaagttctattacttgttccattttacagattagaaaattgaggcgtagagggtttaaaagtttggccaaggtgaaacagctggtgtcagagccaggattagaatctacacactcagccgacagggtgcctaggattaacatcaatgttatactaattacaatgagtgtgatagagaaaagagcaacatgttgaacaaacaaactacctggagaaataaggaaaggcctctcagattagggtcatttacactgggtcttcaagttggaatgaaagttgaccagtcaaagatgcaaatggttctttgaagttacggacagatgggaaagaggcacagggcaaggaatgacagttagactaaactgataagcaggtagttgcctggagaaacaaggatgggtaagttggaaaggtccactgggatgagctgaacatgctttcaaggagttcaacacaaatgtgctgtgtgggaaactccagtttgcctgcctcttggttgaaaatgaaccaaaaagctaaagttctggcttgtgtttgttggctcctctctcctgtctacattgcatcccatatggctttgtttaagtcagtggccctatttgtctcccttcattccttttctaataatccatcctttgtgggtatctactgaaataaagttactgatcacattttaaaataaaatccttttggaagaaaaattaaaattgagcaaatatattctaatcaaatattcatctaatctagcttatttctgcaaaatcaatagtgcccatgatggcaaagttaaaagtacttttcaaaaaccactactgaatatgctaattatttaacttctactccctatttttctaatgtgtcttggtttattcacatcagaaccattgcctgtcaattatcacaagtgtatttcttgagcagaatcaagagaatacaaaagcaggacagaaaacaaaaagatagcagtgtatcatttataccaagtatttccttggatccaatatgggcaaagtgaacagtgtaatttgctgtgtctatataatatatgatttcaaggtaacatgggaatgggagtattgctgtatgtattttttttattttgtcaagaggattgtgtttgtatgtcaaacatacgctctgattttcacatgagaaaaatagaatatttgttttatgtgatgtaaatatacatcttttcatatgatatacttcctttccagctcatcaaaataacatgtgagatttatgggcaggaaagaaacatgaaggagataaatacatcgaggcaactaggagactttcatacatgagccatatccaagaatagccacaactagattaatgatacaatgatcctgagctaaaagcttttggaaatccttataacaatcattaaaataatagtgtaaaacagcagatatcataaatgagagttattaaaatgtaccactaactttgaattattgtgattactgagtgtatttctaaatgcaacttatccttttattattgcatgggacagaaaagagtatgggtttttttggtcatattcataatgttaattatttaaaacaagcaatcttactgtgttttctctagaagaaacagaccaatccacccaagaacctttcacaactaagattccacgaacaactgaactagcaaagacaactcagggtaatcctctcccctacctctggagaataacttttccttatttgcttttaatcaggaaagaaattttctttcagaatgtcatttctcaacacagtggattacttgactttttttgtcattttataggtgaaagaaatcagccaaatctgaatactcatatgaatatcaattgaatgtaggcaagaccagttctttcactggcacttactttttttaatgtattgttgactacttgatgcttataactaagagtggaagatcccattttttccacacatttgaccttcatttgcctcgttttccatatctgataaataataactgttgtcttcctcttcctgctccctctctaacttcctcctggtcctcctccttctcttctctccttttctcactttctccaatcttcccccatttgatgaaatacattaataagaaaaaagctattaaaaagaaaaatcatttttcaaaattatgacaatatttaaacatccagagaagtgatttcctactttttatttcttctctgtgattttctgcttttggggaagtgaactcgcctacacaaagctctatctcatcttcatgcactcagaagtcttttcctctttacacttttctatcctactatcctacttaggttataacacttgtggactgctaataccccttttgcccatctctgcctctatcagatggtagaaagccaaaaataagaccaaaaccagcaaacatttagggagttagaacacaaataaatgtatgttgcccattatgagttctaatttgagggggaaagttggtgggagaagtttgataataagaggaaatgataatgaaagaaatctcattttaaagtacatgtgtcactggggcaatatttattacaagtaaacgtgactaagaaagactatagtaaagggcagttcctctaaattttctaaatcttttttattgtttgtttggtttaactttttgttacgttttaaacttttattcaattacttcatttaatttttatttgctgttaatttataattacacacagaagtctgaagtataacatattgacagccctctcacatctctattaccagcctcagcaatgaacagatgttccgttgtgatacatccctattccaccctgatttctgtatgtttattatttcatgtttttgcaaatctctttaatttctggcttaagagaagatagctggattctcataatcaatctgtttttaccacaaaatacataaatatttacaacaagcaggataaataaagactttcattccacacaggttgtgttgccaaatgagaaagatttcagctttttagagatttaaggatttcagaatgaggataaaagatcacaggcctgttctttcctcgttttgccttttcctactttaaagagaatattgtgtcaccattactagtatatatggaattttaatcaaattccttcaaaatattgtattaaatataaatttcacctgttattgggagtatatccatgatctcatatcattatataaattgtcttaacatatttgtacatgctgacttttttcttatatccttagctcttgtactatgtttaaaattgaaaccctcaaggccatatattgtttggtgatgagctatatgagtaagttacaacctaaacttaaattatatttaagctcttttataaaaaaattctttctagacttaaatgaagactatggagaaaactaaaacaaaaattcagatgccatggctttgaaatcatgtagtgctgattatttctgtggtctactctcaatctctttcctgtccaaagtcttaaaatttatacatattctagaatgagacaagaactatgattcttatcttttttaagcagaagcaacctaacattcaaagggatttatgtggaaagaagaaataggctaaattaacagggaatcccaccatctcaaacttggaagaaaaaaattgcaaataatcatcaggcactttagggtctgtgagaattaatttttatggttattatacttgggaaggcccaaaataaacctatagagaatttcagtgtgtgtccgctgttgttggtttgaagtatggcaaaattctgctcatcacagtctttacattggaagtttataaatgagctacattataaccaatttcacaggcatacttttttaacttagtaggcaaggcattgctgatttatggctatataaatatccactcaatatgtgaataaaatcattaaaatgatgtaatctacttacaaagtttgcaagaaaaaatttttccaaaaacattaccaagaaagctggtggcaggaggcagtatgtgatagggaagtggggacaggagaagcagcatggaatagatgaattccaggatgaatgcttaccttaaaaccttaggatgcattaatatctcagcaggttctcacaagtttgcctgcatacaatggtcacccacttattcattccttcagcaagtcttcattaggatgcctttctgtgcaggtcctggataattggcccagggattatctgagttcttgctccttgcttgtcctcttttgataggcagggcaccagatgtcattttctgtcatttctacagcattatggatgacactgagtgaatacttacttgtttcaggttcatgagcaaagaccatttgatagagaccatatactcctactctttcttctttacctacctaaacattcaatctctttttacctttaagattgcttgacttctttagcaaaataatatttcacaatgactcttcactgagagattagatggatggatggatggacagatgaacagacagatggatggcttatgggtttatcatgctaagcaaacatctggtaaaatgaatgctcttgaaaaatagggacaaaatgatgactaatccttaacacatcttacaaatgaactacctcattctatgtgcatctttaattttcagtcatgtatattttctttgttttattttcctttagcgtgaagtctataatgcataatgggaattttctgaaccttctttatacgtccatgcaaagtgtatgagttgttggtccctaggatgctaaatctccattcaggaggctttggtctgttggttattaaatataaagtgttcctctgtttcagcgccacacagattttatactactgtgaggcccagaacatctgacaagccacacatcagacctggtaagttgtttctctgatgacttaaataatcagcaggcaggggaagatatgaaatggactgaaatagccaaatacaccaaaggggaacccttacattgcaataagagatgtacagagactctgatctgtgtggataagtggaaaggtattgatgaatccataaatgtgacaagacttgactaaggattttgaggataatcagatgcagagatcactatgaaattttattgatttaaaagtatttaaaaatagtgttggacaattttcctgacaaagaggttgcatagagttagctatgacatgttattatttaatacttactttcagatattctttctctctgaagaaaagagggtctcttttcagcacaggaaagctcttgttctgggagaacatttttacttgattccttcagagaataaaaatatcacaagttataaacagcaaaaatagttatatattgggaaatacgttaaatttactaaattctccaaaggtcctaggattaccctcattggagcttgttcagaaaaaaagttaacttgcaggggttgatctagttcatgtaaatcactcttatgctgaggcacaagttggaccacacactggtgtttcattttctttttctttgtgattctaaggactcttaaagttccaaatgatgaaacctgctacgaatgaatgttctcggggaatgcatctttataacaataattttatattatttggtttatgtagagtccatatattttgttataattttccaacttctaaagataattgggcacagaaatcttctataaccatgtgtatttctctctgactttgtgtgtcatgataggtgttgagagcttaatgtgagactggttatattaaacatttctaaaaactaagtagtaacaatcatggctaataatgaccgagcactggccatgtgccctgtgaggtacagttgaggaagctgaggcacacagaggaactagaaagtggatcaaaagatgagcagtatggctccagagcttctcacataagcacagtacacttagtgctcctccttaaagaatcttctaaatgggttataaaatagatcacctctcaaggctttggtaaggctatgactttctcccaagcaggaaagaaagtaaaatggtttcatcaagttctgtgcttggcaatggactttgtgaaaggactagtataatgaaacctctgtacctagggattcccacaaaaggatgtggaaagactccaacttatgaatggaggccttgacaaatacatttcagattttggtttttcattagacatatgtagtcctgatctttcttcagttccattttggaatgtatctaatgcctataaatgaaacaagatctttcccacttcggattataaattcccttgccagttactttttcaagtcaagtattgaagcccagtgatcacctcagaatacaaattcaggtctctattttcaaattcaagtctattatttttatacgagactgtggtttctatattctgaataatatttttggtaagtcatcttttttattgcctaaatgactttcaattctctgagaaattttgtttttctcggctgcaaactttcaataagaaaatgaactatttatatcccactttattttagttctgaataggacaactacaagacctactaggcccaaacccagtgggatgcccagtgggaatggagtgggaacaggtaataatcacaaatgtatttcctttttatcctgtcaaaactataagtgttatttaattttcatgatattgctgaattcacattttaatttcctttttaccagtttttaaagttcttagtaactctgtaactgaaaattataactcattccaaaatcaaaacttcaaatgtctctaaaaatagtgaagactttttcacttttctaaacctagtctactagttactatatataatcttgcttctgaaaacgatcctgattaagaataaattgagtgaaaacactaaaaatagctatttcccctaatttcaaaatgctttttctacacagactagtctttgaactgtaattagttggtttttaagtttataatttaccaagtaccattaaaattttttttgaataactgcatctgttagcaatctggaatatgaaatttaaacaacaaatatttaatcagagcaattcgcatctggttaccctggtaacagtcactaatgttttcaaatcattcatcttaaataacatagctctaatctaatcagatctctgggagtaagtattatgctagaaaaactaggacactgatctaataaatattcaaacacccaacttcatggataaatggtagttatttagatgccttaacatagaattgtatcattccctttaaatatttttagtagtataactcttgtgtttgcttaggtaaaaaaattaaaatttatttaatgtatatatatctgatgaacccatgacggttctctaatgaaaaagagatgtgaataatacctagagatatttagtctacaaattatttagctttaagaatgtgctttttgtacttgattattacagtctctgaatttctaggaattcacttatcttcaaaccaaataatgaggccaatactataaattcatgacttatgaaaagcaagaaagcatctcaatatctatttgtgctcagctactctttttattctgcccaactgtgggattagatggtgcacaatttttcagattgacataagcaatctggctgtaaacggagccaccttctctcagatccttttgggaggaaggcaggtacaaattgtttaatattcaaataattccttggaagttgcataagtaaaaataaaagcacttagatgtcaaccaagcaaatgaaagaacaagtaaagtagctgtgatcacacttgaaagctactaaccttcactataatactgattcttattaggagcatgcaattatctctcagggaaacaaaccattattatattttagcttatcaacaatataaatattcttccaaagcccacttgtattacaaatggatatctattaccttcttatatacataaagtcaactttataataatgtatccaacttagctttggaagaataatatagcagggcttttcaatttaatttgtcaattgttgggagaaattgggctggtgggcacaggtagacaaagctgagctcactgtttcctctttctttactccacctccatccccaaacaaaattttttgtgcctggtctatattcttttatttgttgattgggatcccctgtcaaggaaggacttgctgcctgcctgcagggagtgaggtcagcagacggcacccagctatcatctccctcagagtaagcttcaaccagagagcactgaatggagatctgggcagtacatctccatgtcagccacagtaatttatagcaaccaaatggaattcatcctaggaatgcaaggttggctcaacactcaaacaaattagtgtaattcaccatgtaacagaataaagaagaaaaatcatatgattatccaattatatgcacaaaacaacctagacaaaattttaaattcatccccaatgaaagctctcaggaaattaagaataaaaggaattttcctcaatctgataaagggcatctgtgaaaaagctacgactgccaaaattcacaccagcagtagttgtggccgagtggttaaggcaatagactagaaaaagctgcaactaacactgtacttaatggtgaaagactaaacacttttctcctaagatggagagtacagcagggatttctattttcaccacttctattgaatatagtagtgaatgtttagccaatgcagtaggcaagaaaagaagtaaatggcataaaattcagaaattatagataacatgatcatctatgtagcatattattatggaaaacaacagctctcagatatttgcctagagaatactattttcaaaaattggtgaggaaaaaatgtttaaaaatctctcctctcccggttgtagacttaccttagtccaccttcctttgattctgcatagttttgatcagacttctttatagaaatgcagctgttcacaaaagtttcttttcttctctgacacaattctactgtctcatccacactttcagcctctgttgactcttctaatgcatcatttttgtgttaaatggtttcatgttcagctttgacatcttactcagaatatttatctttattatccatctcacattttcctatagtttttcttgctgaagttttcaactcagatatttcacattttaaaaaattagttaataaaggaagtgtttgtgatctataggacatattctttttaattttattttttaaaatttttatttcaatggtttttgggttttgttgttacatggataaacatgaatggttttttgttacatggatgaattatatagtgttgaatttgagattttagtgcactcattacctgagtagtgtacactgtacctaataagttgtagttttttatccctagcttcctctcaccctcccccttctgggtctctaaagttcggtatatcactctgtatgcctttgtgtacttacagcttacctcccacttttaagtaagaacatatagtttttggttttccactcctgagttacttcacttagaataatggtctctagatccatccaaattgctgcaaaagacgttatcatgttccttttttatcactgagtagtattccatggtgtatatataccagacattttctttatctacttattagtcaatggtcacttaagttggttccatatctttgcaattgtgaattgtgctgcaataaacatacatgtgcatgtatatttttcatataatgacttattttcctctaagtagatacccagtagtagtattgctgggttgaatggtagttctactattagttctttaaggaatctccaaactcttttctgtagaggttgtactaatttacattcccaccagcgatgtataagtggccccttttccctacatccacgccatctcatctattgttttttgacttttgataatggccattcttgcaggagaaaggtggtatctcattgtggttttaatttgtagttcctataggacatgttctttacagtcttagaccacctaaggttgtgcccttggaagacttaaaaaaggaaaaacagattctgaggcctaaggactacagacctttgactgttgaggtctctataaaaatcttgtgattccgtaagccccaggaatatcttgagctcagtattttatatgttatttcactcattttagatattttccctgatgtatgtgtattttatgcatgtatgtgtagatagacattgctgtaccccaaggttagaaagtagcctgcagaggttgaggtctaaagtgggtcatttttctagcattctgcttttccatggtttccagagacgtgtcccagcttagctgatgtgtcctacctattaaaatctccttgagacctgcctacagagatgctacaagccatgcacacaccaggccaagggattgtgcaaactacagccccacaggccaaatctggctcactgcctgtttctgtaaataaagttttattggaaacacatctacgtttcacattgtgctatgtacaatgtgtactgtgtacaaaggtacttatacagtactatggcagagttgaatcgttgtggcagagacagtatggcccacaaaggtgaaaatatttattgtctagcatggggttggcagactgtttctgtaaaggataaatgttttcaactctgtgggcaaaacagtctctttcacagatatttaattctgccattgtgctgtgaaagcaagtatagaaaaagtttgccaatcccagtgctagacaatctctctgactttctccctgagggaagttgtgcagctatttttttcattcaaccaacatttattgaaagcccattatgtactaggcaaagtgtaattctgaaaccaccttggcacatatgatttggcagatattgttaaatacctgaaccctagactcctttctctacaccctaatgagggaaccacaatttactgcccccacatgagtgtgctgcacgataatccagtcccctcaggctgaggaatgtgtttttctgggctgtaactaaatcttccagcctgctggctccctgcccgtggctttttaaccaggtgctgagatttgggacaagagtgcagaaaccaatcatccataaatatcacccctttttgatcacagggaatgaagtcactggtacatttaagaaccgatttccagtttactgtttgtttgcaaagtttttgttaccatggttaaaaatacccaaattgttacttcattttggatgataaattgctgaggggtgaactatgtaaatccagagatttttgtaggactcttttatggcagttgggggctcattctgaggctcaagtcttgatgcttacagagctgactctgccctttagaagatgtgttggttaatcctgcctgagggaaaaagaagtcaggtcacagcttgggccagactgtctaattgggtgccaattcctgagaatttgttctttacagtatctcttactgattttctcctttctcttactgattttctcctttctcttactgattttctcctttctcttcccattccctctctgctacctttgaccttcatttgctctcctctgactcaaggcaagagatgttcactagtctctccagttctggcccgggtgaaatgcctcaacagcagctaggtgcaggagagcaagtccagaataagagctcagtctcctgcccccagatctttccaccgagccacacagctgccttttgcatggcccttcccaatgctttcaggcaccactggcttctatccatttctaaaggctggagaaagtccagttttgcagctgcttctctatttgatttgggaacttatgtctaaggatcataagaatatgatgcctctgtctccacctacatagaaaatggctcatttcttccagtttctccctggataaaaaaaaaagagggcaagggaatttgtatctttggtcttacgtataatgtaactctgcaaaatttggattctcttcagagctcctagatttctaacctaccagcccctgtgacttggtggacttgcatatgcctggtcagtgactgctggcagccttggactaccttctgagtcccacacacccgtggcatggctggataacacatgcttgccagctatggccatttagccctcacacagtggtggcagctcaagccacccaagagacagagtagagggctctgggaatgtattcactcagagttactatgaggaatagcaggaagaaaatgatcagatgacagtaagtactctgttctttgcatcttagtgctgaagagataggctttggatcctggcatatgtaggcctgaatcccactgcttcctagctgtgagaccttgggcaaattgcttaatctccccttgccttggattttctcatctgtgggatgtggattatattccacacacagacggttgtaaggattaagtcaagtcatgaatatgtaaggcacttgcacagtattggatcaagatactttgtttttcaagggcaggaagatttggaaaagggctgtaaagaagggtctactcaagacagcctactagccttctagggtatataaaactttgtgttaccctggagaaatcgtggtaaaccaaacctcggcaagccaagttaccccagtgacccccatgcaggtattcttcaattccctatgctgttcacagagtaaccactcaaatgagccatttcccttccccactacccctgacagtgagacacaggaggaagactaatgaaccatttgcctgtggcctgcctatgagattagtcacaaaagtcattgcccccagaaacatttttttcctatcacaaataagtttaattcatgattccatatgtaattttctccatgattttatgtattttatctcttactcaagcagcagaggatgtgggattgcaatattaggttcatcccctgaatgtcataaattaatgtgaaaatgtcatcatatttttgggaggcaaagcttctgttgtatatttaatatatctgcccacacattaaatgagatcaagtatataatgtccccaaacagtttctggaacacagtgagtcctcaaaacagggttgttgtcattgttaatgtactaactagtatattaatgtaaatatttcattcctattcttaatatgtaaattacagtcaggtcctcaaagtagtatgaattcttttttaggacaggtcattatttctgaagtgatttttattgtttaaattctaaaaatgtctgtttctattcttttataatgaagactgtcacccaaaccaaggaagattattttataatatcaaagaataatttttaaaatacgacaaaaacctaattagttccctttgggattgctacccaaagtccaagcctgagtatttaggcaaatggctagtaataaccacaagattattgaggggcttaggagacaaaatatcacacaaagtaattttcaaatcagtttctttcaaacagtaattttgagttagaggcctgcccagggctaatttacaaatcccaaaagatcatttgtggtctcaatagcctcatagccaatgccactccaggaataattttaaagtcaattcattaagtataaacccaaacacattggaattctaaggtgtatgtgtgtgggttttttttaatgggcatagagggattggaagaaaaaaattttttttgaattacaaaatgtactgatgaatattggcaaaaggtggccagttaccataaatgaaatcccacctggtgaggcaataccacccagtaaggcagtgcaggatgagtttcatgaaagatttggacaaaaccacaatttaccatgaaatgctaattctacagagaaaacatcacaactagtgaatgtagggtttttatttttttctatagccagatagtagaagcccgtaaaatgtcttggcataaaaacaccaatgctcctgctctgcaaagaatgtacgttattactggcaactctaccaagtttccatggaacatttttgctatatgtttattccctttcattatctctgctcataggggtcaagcaagcacccaggccatcaggtgctgatagaaatgtatcagtggactctacccaccccactaaaaagccaggtaagtaataacatgctgacttttatgacagctcagctctgaaacttggatggtaactgcagtatcattcctggtggcaaaaacagcaacatccacacagcccccgaagtatcagaaccacacacacagtgcatgggtattgctaggaaaacatttggaatattatctttggaggaattaaaagtgctctgtgcacaaattaagtattaataggaacttctgatgtgatactaacttaatcattacttgctataatgttctgagggaccataatggacaaatgctgcagaatcactgtggtttctagtttttatcatgttttaagttctgctcttgtgtaatttattacaatttttttttgcctgatattacttatgttcctgatttaagagtatgatctatgtaataggccaaaagtatgaatctggtgactcagaatacctttggattgaataaagacttttattaatgtcaactaccagtacactcctgaacacatagagagagagagagagagagagagagagtctttctcttactagtataccaggcattttcctggattaacaatttttcttgaagattttaaaaccaacatatgttatgccaaaaaaagatataaattgtttaactatagcacaagacttaaaatgtgggttaaagcagacttctccaagcacctttgacctcaccaacctttctgcaaattataaaaaggtgcctgtttaccccaccctttaggcagacaatgagaaaaacaaagcccttcctcttgtctggtgccttgcatgagagctcataagtggatgagcagagcaggtgctaagctttgtcccccacttacacctcctgggccaagtgtctttgtgtggtacacaactaccacaactgttcacagtgagcctgctccctacagatacagacttgtttcagctatcagggttacctcgatgtagtctttgagaagttctaaagggttttaattataattacataatagagctgagaatggatcaaaacacccacaaaaggagaaattttatgctttaacaatttaaaactaaaatggtataagaaattgtaggctcaaaataaaaggcagctggggataatgaagttcagaagtgcttctgttaagtctacatggaaaatgaaagatgttaaattctatgcgtgtttatagcctttcaaaaagtagatatacctgtgtacagtcatctcttggtatctatgggggattggtcccaggattttcctcagatactaaaatctgaggatgctcaaatcccttatataaaatcatatagtgtttgcatataacccatgcacatcttcccatatacttaaatcttccattataatacctaatgcaatataaataattgttacattttgtgttttgctgttgttgtattgttatttttattgtggtttttaaaaaaattttccatccacagttgtttgaattaactgatggggaacccacagatatgaagggcccgactgtatattcatctataatgaggacatgttttctatatactacagtgcgttgttgtccctggggacattaccaacatttatttataggaatatctgaatatatttgtgtgcacttttctgtagaatctattctctgtcatccaactgctaattatcaaacattattttttatttttaaaaaccctgtttttttcgataatgaatctttatgatggctttatctaaaatacaatctcttatccacaatcccagggactcgccgcccacccttgccacccagacctacacacccacgaagaaaacctttaccaccaaataatgtcactggaaagccaggaagtgcaggtacgttagtcatgtaccttccttttcccgccatgatttcggttttactagccaacataagctcttcttggcgtgctagcaacaggcacactattgatgtgtgtgacacgtttgtgttggccctgaagactagacactgtaaatgatggctttcaggacttacaacctgattcttggactgaaagaaggaaaccatgcctctgcatctaggcaagtttgcttcttagatgtctgagtgcttggagcctagattgaagctgactcagacccttcaacaaatggattattttggacaagatgctgtacattgccaaggccccaggaataatagatgtgatgacttgtcattgacttatcattctgtctcctgaaataaaattctatatgtcccactgaaagctctcctatccaacagccttcatgccaggcctggtattatggtgctcaggggaagatctgggactaaaatattcagggtgacggaaaggcctagcctgtgcaacagtacaggagtatgttttggaggcaagctgcctcttacctccatgcctgggcacacacattcctcctccctatagaatgaccctttccaggcttggcttgggatactcagacttcatccttttctttaaaaacctcccctgactcctcaaggtagtcttggcactgcttctctgttcttgtccttgacatacccctctgttagagcaaagagaaaattgtgtcagacctgtttgtttgcatacttttcttccccaatagactgtgagctctgtgatgacaaagtccttggttttttttctctgaattcccagaaccaaatccagtgcttagcacttagaggatatttgatgagtaataacaaagtgaataaaggaatgaaattgagtcagtaaaattgacctagttcagacagaagctttacctcatactgagggttcttcacccaggacatgccagcaaatttcagcatgttccccatctttcctccctctctccagaacactacttccgaaatattttgtaggtggaatcgggataagagtgttaaaacagctgtgaaagatgaaactgatgaggatcgccatgaaagggagtggatgtcactgttctcacaggatgaaaggaggctgttgtgatggagcttgtaggacgtcccatgtgcacagtgaactctaggtcattttcccatgggctgaaggaggaagcagcctcccatccatacctctggtgcctttctgagtcaaggcccagtgacatggccttgctaggagaccgggtttccccatttactgtaacctggggcagctgtgacttgagctccagcagcttgcagatcagactggatgagccacagggtgatgcctgagtgtgccacttgggggccccctccagagcaatgctgtgaggctgtgtgccttaaggagctgtttgatggccttcttgcctgccatataaacccttgttctctcctgtcagtaaacatagctttggtacagcccacccagcctgaagaagaactgtaaatacattccacttctgagatgaaccctagtccctgctctccaccctcaccctccaccattcacctctaactcaagggaaatggctgcactgaggagccaaaccataattgagggcactggtacagatttggcctgattagcatcacagaaagtgtatcttgaattccagtccaatgtcctggagtcctctgaggctctctcacatgtgtctgtgaacacagtctggggctgccaccatgtgacatgtgccacttgccctcaatctccagatccacccaggcttctgagtcccactctcctcaccagaatgaaaatgctatgctatgccagcatttcctgttgtctctgtcaactctggaaagcccttgtggactgcagtgcaacttctcttgggttttgcttgacctcttattgtggctcatactcactagggtcaggaacatgcatccctggaggccaggtcagaggcccttctgactactcagccctgattccatgctgggtcatagtccttgggtcaggcttgtatcccttgactctctattgcccaaaagtgactccttctccccggtggaacataaaattcaatctagtctcctttcgactccaaacacccagacttgcctggaccttgggatggatccagttttagggacttataagtgttttaagagtggaggagtcactgttgaatatagcaatcagggtagcactatactggccaccaggccagaatcatggacattaaccctaggaatctttttccttcttctgtagccatcttccatgcctgccactgagtctcctgacagctctcatgtccaccccttacatcctgtcccactgcctttgctgtagtacaccttcctttctcttgcctacacaagtgactcagtccctaaaaataacatccaaatccatggtattcaacttctttcatgatctgcccttccttgcccttccactctcagctcttattgtaccccttcaagttaaacacaccaggctgttgcatgcttccctgacatgtttcttgttataacctctgtctataatactgctcttgtctctacctaccaataacttctcctctattggcacatcctctgtgaaggcatttctctgcccactccaaaccgacaaccctccatctttcctcacagacataaccactccctcttcttacgcgccccctctgtgatgttatctagtactttttcacaatgtctataataatgctctgatatacttggctcatacatctatctccaccaagaatcaggtcttgttttctctccaagcctggtctatagtgccaagccacatggtcagtgcttaaaaacatttatggaataaataaatgtttataggaaacttggcagtgttcctataaagcctgactactttggctctactttacaggaatcatttcatcaggcccaataactacaccacccctgaggtcaacacccaggcctactggaactcccttggagagaatagagacagatataaagcaaccaacagttcctgcctctggagaagaactgggttcgtatggccatcagttctcactggatacttagctgtgaggtgcaaaagattttaaatgttggtggggatgggtgagtctcagtttgaggtcttctattttactccattttatgattaatatggttgtttttaattttaaaataatacttattttcaacactcccttatagagtattatccttcccttagcagacatagaagaaactgcgtaactttggttcataaaaagatctagactacctaatgctactactaaatcacattattaccaactacacatatcttaagttattagtgcatattaaccacttggttataatttgtaattcattactcacactatagaacaccttgcagcaggacacaactaatggccttatattgtggatgaatatgtataattttaaaaaatcaaaactgcaagcagtttacaagaagaaatattgaatatctttagtctacaactttttcattgtattgtgaagcttttttatcttttgccaaaactgttcattattttccattctcagaaaatataactgactttagctcaagcccaacaagagaaactgatcctcttgggaagccaagattcaaaggtatgtatgactggctgtgaatctcacatttgaaaaggccatttttggtaggtgtatcagccagttattgctgtgtaaaaaaccacaaatcttagtagcctattataataataaggttttatttttcatgggtgtctgcaagtcaactgggtgtcagctgatctaggatatgtttagcttagtggttctgcttctagcagcaggtacagctaggcctcttgtgggttggactcaggtccaccccacatgtgtttactctgattcccaggatgaacaaccaacagtgacccaggggaagccattttcgtaataatgcaaaatcaagaaagggggtgtccaaatgcaaaaccacatttaaagctcctttttgtgtcatatctaccaatgtccattggccaaaaaatgtcacacagccaagatcaaatcaaggattggggaagaatacttctcctgtggacataaagaatagttttgaacaacaatctaccacagtaggagagatacaatatgacatagagcccttttttttctgaaatgtaacatttgatgaattttaatatatgtatacacccatgagaccatcatcacaatcaagataataacccatatataacttccaaaagtttcatcatgtgtctttgcaatccctttctcttattcctcccactcaaccccccagtgcctacgtggcaacaggcctgccatactatagtatgtactttatgaaattttatataaatgaaaacatacagtatgaactctttttgttgtcaggcttcttttatcagcataaatatttggagatttctctatgttgctgcatgtatatcagtagtccattcctttttattgctgactagcatgctattatttggatattcaataatttgtttctttagtaaatgcattcgtggcattggtatttcttttacattactgataaagctattatgaccattcatgtacatgtctttgtatagccatatgctttcattcctttggacaaatacctaggaaggggtggctacatgacatataagtgtttatataacattttaaaagactgttttccaaagtagttgtactgttttacctttctatcagcagagatgagagttctagttcctccaaatcctcaccaacatttgttatggtcagtcttttttattttagccattttaataggtgtgtaatggtatctgattatggttttaatttgcaaccacttaataacattgaacatcttatgtgcttatttgccatctatatatcttttttgctatttccaatatttttgcccattttaaaaaatggagttgcttgtttaatgttgaattttgagaatctatattttctggatacaagaccatttttagatacatactttgaaaatattttttcccagtgtgtgtcttctaattttaatgaagctcggtgtatcaatttttagtagaattcactttctttaataggtatggagctattcagaatagtttttctttttcttttctttttttttttttttttgagatggactctcgctctgttgcccaggctgaagtgcagtggtgtgatctcatctcactgcaacctccgcttcctgggttcaagtgattttcctgcctcagcctccccaagcagctgagattacaggtgcccgtcaccatccccatagtttttgtatttttagtagagatgtggtttcaccatgttggccaggctgatctcaaactcccgactgccagtgatccacccatctcggcctcccaaagtgctgggattataggcatgagccaccacgcccagcctgcattttattttgggtgtgtagaaccttacatttaatatggctattgatattggtacatttaaatcttcatcttgctatttgctttctatttttcccatctattctttgttcccttttttcctctttgtcaatcttcttttaggttgagtatgttacgatttcatttaatcttttttgttgtcttattaactgtaattttgttttattattttcatggttgctttggggtttatagtatgtatctttaatttatcacaatctgccgtctagtgataatctacaacttcacatataagaacctcacactagcatagctttactcccctcttggcctttggactattattgtcatacattttacttttacatgttatatacattaccgtaaggtgtttttatttatgtttaaacagtaaactattttttagagataaataataagaaaaacattgtgtatgttacctatgtgtttactgtcactgcgcttttcatcactttgtgtggctccatatttctgtcggcattgtttccttcctacctgaaagacttcctttaatatttcttttagtgtgggccttctggcaaataaattcttacagattttgtatgtctagaaaaagtgttttgcttttaaggtattttcactacttattaaattctaaatgatgtcttttatttcaataattgaagatgctgtttcaatgcctctcacttgcattctttctagtaagaaatctgccacaatccttatctttgttgttctgtatacaacatgtctttttttggtctgcctcctttaaggattttctctttatcacttgttttgagaaacttgattatgactggcatatagttttctacatttttgttgtttctaggtatctttgagctttttggatctatgggtttagaagttttatcatatttggaagatttgggaccattatttcttaaaatatttttttctgctcacccgcttctttacctcaggtactccaattacatgtatatgagaccaccagaaatggtccacacagctcagtgatgttcattatttttaatgtttatcttctctccctctttttggatgtttttattgctatgtctttgagttcactaatcatttattctgtattatcttataggtattaattctaaccagtgcatcttctgtcttatagctttcatctctagaaatttgatttgggtcttttttaatatcatacatgtctttactaactttttgaatatgtggattatagtaataagtataattcttatctgattattctaacatctatgtgagatctacattggtttcaaatgattgatttttttctccttattataggtaatattttcctatgaattttaccttttaggtgctggattttttttttaattattcctagattattcttgagttttgttctgggatacagtaaaatacttgaagctacttgattcttttgagtctagtttttaaaatttattgagtgggaccagaactgtgtttagtatagagctaattattccctaccactgagggtaagacccagtgccccataaagtatgaagtttaaactatgcttagggggatcaaattactttcggatattagcataagctaaacttattcagtaagtaaatcaacaccaccctatatcacgtatctcagaggcaagattttgaattttcctagtttgaaccatccacatcatggctttcaaccatccgcttataatatgagaccaaatgtcctcaaattatatttatgagctcacttctatcttcttcatgagtttcaaaaatgttaaatgtcaagggtcctctctctcgtaggacctcatgtgcgatacatccaaaagcctgacaacagtccctgctccattactgactctgtcaaacggttccccaaagaggaggccacagaggggaatgccaccagcccaccacagaacccacccaccaacctcactgtggtcaccgtggaagggtgcccctcatttgtcatcttggactgggaaaagccactaaatgacactgtcactggtaagatcatggcatgaggactgttatggtgggaagctttgataacaagataccctgggagtggggtaccctgggtcaacgttgacatgtgaagcatacctggggaggagacaaaactagcagttttgctgcctttaaggcacattattgtcaacaatgtcataggatgagaaaagatcatctttgtccttgttatggtctccctgttaatttagtaaatctcctcaagctgcattctttccatctcctctcagaactctttttcacacaatgaagaagaagctagtctttcattatccagaaaattacattgctgattaatttaaaactaattttcctttcaccaaccccatttcttattgacctagaactttctagcagactaaaggttacttcaactgtcttaggataaataaaaacaaaaattctattcctgatcaattttcttctcatcttaagaaatttttattctgttaccacccaccaattcctctaaaaatgattgtaaaaactaagaaaccccaagacactctgaatttgttatacaacagtctgattctccataacgaagaggatagtcaaacgagaggaggatgaaaaaagactagcaagctaaatcagctagaggatatagcaaatagcatggtaagtgaattcctgccacccaagttcctgccatgtacctggtgcaggcaggcagggaatagaggggtcaactaagaggccatcaggaagggagaggagcagtgcacaggaccaggtagcgcatgcagggactcaggatctgccaaaaacatttcctactgcacatggaaaacagcagctatgtctcctcagacagaaccattggatctgggcaacttccagtgtaagcggcttatcttaactagctttctttaccacgttttgtgagtttccctttctcatgcaaagctagcctttgttttgagaaagaacccactgctacccatggttcctggagattttcctagtcctgcttctttccttgggactgtgctaataggtactacaaatatctaaaaatcaattaatctctcagtactgattatctacatccattaaaatgtctaaaactcttcatatactgtgctagtaaggagttcctgtgatcatctgaggcttagttctcatgaaactaaatgatctataaaatttcatttgccttaaagatacggaacattgagttggaactggttaatctaatacatttaattatcgaatacacatcaacttggatatattcataatatccgatgtaactttattaagctgaagaattggcctttctgattgtatatatgtttaatctcaaaaaatcatggatagagtatactttatccatctaaccaaactgcttttgtaatgctgttactaaatgttaatgaggtgcttgagatctgtcacatgatacagaggacttataacaatttttgtggacaaggatcacatctctttagctgcagaatttcctaaatagaattaagttcgtatttaaccatagttcacctagtccgtatttaaacattagaccatttgccctaaaatcctgttggtttttcattccattttgttttagtgttcccttaaataccacttgatttcaaaagcgattgtttacaaaccagcagctcagataatatagagattaattcttatatctcttgaactgactttacaaaaaggaactgagatataatagagttatatctattcttccccctgagttggcttctttctttgagttgatggggacacatattcacctccagtgaagacatccagcttcagctgcttctacatgtcctttctatactgaagtagaaaaaggtacaccaaaaaattggccatagcctggatccttgggcaacttcaagttgttagttatcagcatcataatctgatagtccaagagcatgctgacacagatttaaatcccagaccagctttattttagatactcaacttgtgtataaaattagactgtttgagccttagtttccttaggtgtaataataataataatcctcattgttatcaatttatcctgaggagaaaaataagatatttgaatatgccgcataaactagaaattgttaatgtttatcggtaggagcaatttttgtaatggtggatttacgaaaaggtattagcacttgaaaggattaaaaaatgggaaatatatatttacaaagcacaagacaaatgtatattcaaaagctacaattctgaaattctaaatgtctttttaattaggaagaaagcttctagatccattttgagaattctgatcttccataaaaaaaattattaaatcagcttttaaaacttgagccaggccgggctcagtggctcacgcctgtaatcccagcactctgggaggctgaggtgggcggattacgaggtcaggagatcaagatcatcctggctaacacggtgaaaccccgtctctactaaaaatacaaaaaattagccgggtgtggtggcgggcgcctgtagccccagctactccggaggctgaggcaggagaatggagtgaacccaggaggcggagcttgcagtgagccgagatggcgtcactgcactccagcctaggcgacagagtgtgagactccgtctcaaaaaaaaaaaaaaaaaaaaacttgagccaaatggaaatcagagaagacatgcaatagaagtttcaactactaaaaggcaggtttaatattaagaagaatgtcatacagttgaggaatgtcccaagccaaagatgctttctgaaggtggttgctttggtgcataaccaactggagtgtcatataaattgttcttttggtgatttagcagcacgtgaacctttcctattggaatcttaaaatttttctagtcatattttcaaaccacaactcaaggatgataaataataataaaagcagcataataataggtaccacctgttgaacaaaatctatgaaaaatactatcaaggcactttccacctgtacccaatttaatccccataagcagtagtatgaagagatattattaaccttccacggatgggaggactgagaccaagttcaaggcaggtggcttaatttgtttctttccattaagctgtttggtttcctttttttttttttttaatcaattttacttgcattttaagtccttccatctttttctaacaaatatcccttcacagctgaggaaaaaatataaaatggacagattttaattcagaattctctcccttcctctccctttccagtccgttcggagagccagctgagagatagttttggatcaaaaagaagtctcagtgacagcactagataacagtcatcagtactttaatagctgcaccaatagtatccagaaaccatggccactgtcttccagtttaatttttaatttttggaagaatggtcatacaaaattgttcagaaaaaatcatcctcctcttggggtattttaaatatgcaatgaaaaatcttcctaaggctgggcgcagtggctcacgcctgtaatcccaacacttttgagaagctgaggtgggtggatcgcttgagctcagaagttcaataccagcctgggcaacatggcaaaaccctgtctctacaaaaaattagctgggtgtggtggtgcgctactcgggaggctgaggtgggaggatagcatgaccccgggaggcggaggttgcagtgagcctccccaacaaaaaaaaatcctcccccaaatatgaattggtgaattggggtctatctgggttattctagttttttattttatttccaatgtccatctcataccactgggctcagtgctaacagcagaaatccctaatataacttgccagatctttggcagccttttcaccttgtctgatgtccagtacttgcatatttcttcatattaatggagctgattttgagtggggtttattgtttgggtttttggttcttttttagtcctctgtatcatctcatcacatgcattaagctaagtcccaaatgagagcagagaaatccaatgaacaaatgtgtaaatggcattcccttattctaaatttctttcccttttgatgagccctgcaagttcatagaaatgtgcccttaagtgaaatttaggcagatctctatgcagactttaaggacattaatttgtttttcaatacaaggaaaataatcatgggagcataacttatgtaggcagcgagtacaaaaaccaactactcctatagttcaaaataatgaactatagaaaagtagagtttattatttgattagctgctatttggtgctgtgatgctcaactgaaagaagttttctgcagcaataccaggtatccagtagccttttccccaactatattctaaagcccatagagcagagaacatgtctactcaggcaccactcctcctacagtgctttccccaaatggggctttgcagcagcggcagactatctgactcacctaacaaaatcaaaggctatgtatccaaagcaaccacaggcgtggcatgggtcttcaccagttaccaggtcttcctttgcctctggtaaaggaaatgcagaaatagtcaatgaacaaatcccaaaatgcttctggagccttcatctgctgaccatccccatatggaaattgccaatgtgtaagatcaatatgtctctagaacttccatctcaattgcttactttatgtaagtggcttttttatgctattagcttcaggagcaattaagtcagccaagaaataaaaacaagtatctgttggcttctttcgctttacagaatatgaagttatatccagagaaaatgggtcattcagtgggaagaacaagtccattcaaatgacaaatcagacattttccacagtagaaaatctgaaaccaaacacgaggtaagccaccagtgctattccaggtaaattctgagagtgcaaaagttataaccacaacaagggaaagaaatgataatcatcttctctgtcttgagggtggctctagcttccatttcactcttgggttttctatatatagcactagatacctctggagtcatgttttgcaaatacttgaattactggtgggtttaaaattgctgacaaggtggtcttgttaattaacagtattacatctttaaaaaaacatctgataccaaatgttgatattaaatacaaaaataaaagtctgtggaccagtgacaactggactgtgcataatgtaaactacatgggaagcaccaaaaaattaaaacgctggaaaggagagggcaagaaaaggaaagtcttgtgacaaaatgtaggtgaaagtttttaagcgttaatacttaaaataactacagactagtctcaggcacagcaattctttgctttgggaccttttatcatggataaaatgaaatagggttttgacaagagttacatatctttaacgttgtttgataacttttctaagtatccctgtttattacacattgataccaggttgttcatattgctgtacagttttgtgattcttttttcaatctaaaatatccaacattttattagttcattttattactgaaagaaaaataagtgtcttagacatttctagaaatgtagtaaggaagttccaagttttttttttttttcataatgttcacattgtcatcaattgattgaattgaattagttattgatagtgacgctcaaaagagcctattttggctctgacagtagggagactcttctgatctttttgtagaaaagggaggaccatctaattcactacaggcagttcactgtgtataaactagtccgatactgcaaaaacaatacttctttcacaagcatggggtttttctttaaagttctctaagatatattttacaactgctaattttcttaaaagacttttagccaaaataagcatatgtcagtaaaagcccatttgctctttgttctgtttccttagcatttccttagatcgagagggggagaaagtctgttttgccataatatatttgaaggaatgagtgaaagaaaaggtcacttaatttggactttttaataggtgaatttgtgcttatgaaagttggcttttccgttttctgctttttattccactttataaaaagtgacttgtaaagtacaagacagtcattgaaaggcatccagtttctaaatgttcactgtggtttttttctgaattggactgtcctcagatcttctcacagtgcacttattagctcatgatctgaatgttgaatacagttatttcagtatcattttaaacccaatttgtttgtaaaaggtttgcatttgcatttccattcagcaaacatttattaagtatggctacacacacgaataaacatggtggctgcccttgaactcaaggctagaggagaggcagttaatgaccaaggattctacacaaagtagtgagaactctgaatgaagcatgcccaaggtgctatgggatcccagggtgggaggcactacgcaacgtcatcagaaattaggaaaatcttcctgaagaaggtgacacctggtctgaggcttgaagtatgagtgggaaggagctagtcaggtgattataggcaaagagagtgttagaatagtgtatgtcagtacacggagggccaaaatggcatggttgtgtgcagtgaaaaataggctatttttacctcagcatgagtaacggtaagtggatgggaggcaaaggaaacagtgggaagccagggtggagagggtcttataagccagatcaggagatggggagactctgaagggtggtaattgggaggatgacttgctcccacttttcatttgtgttttcattctggcttttagtcggaataatcacttttagtatttgagcctgtttatattgagcaacagttgctggaataaatctaataaaaaataactttttgttcatgtcttggcaagagtgccatttgggtatctgacctgcctggtgaagtaggtagagaaaagtgccccagggctaagatgcattttattctgtaatcacaggtcatggggctcacatgtagcttctggttgtaattgttttaggacttattctagctgtttctagaaattgcttcacactgaaagacagtatggccctctttatcccaccctcattatatgtcctgtttattgctcctgtcttttgtcagtgggccttctgaggaggacccctaaaacctatccttacctcaagactagcaaagcccagaggagtgcctgtctagattttttcttttttcttttttttttttttgagacagagtcttgctcttgtcacccaggctggagcacaatggtgtgatctcggctcactgcaacctctgcctccagggttcaagcgattctcctgcctgagcctccaaagtagctgggattacgggcacctaccaccacacccggctactttttttgtatttttagtagagatggggtttctccacgttggctaggctggtcttgaactcctgacctcaggtgactaacctgcctcagcttcccaaagtgctgggattacaggtgtgagccaccacgcccagcccccgtctagatttagctttgggaaaaagcaatgttaaatcaagtttagggccttctaaatcaggatcccatgccgaattttaccactggcactaatttgaggtcattcagtgtgtctattatatgtggcttacttaacattattttaagaatttggtatggttcagtgaaatccatcaggatatcaaaatcattaattttcatataaatgatttggccaggattatattggtagtccctaactaatggatcatgacttaggagttgtaaatcagtagtctgaagtaaagaacatttttgcatttggggaaaaatataatacatatggatgtaaaggtgctttcatgaacactgtttagtcctcagtatgtgaaactttatggtggtcaaggagttcaatagatcctagcctccgatgagcctctgaatgaatttcacatctcttttaccaggtatgtcagagattcaatgagcaaaaatgtttgggctgaaatattaaaatatattgaaatctccattagaaaaaataatgaattatggaaaagtaaaatgaggtaaattatttcaattagagatttctgaagcctaaaagtatctggggaaacaaaagtaacacctgttaaataattggagatcataaaaaaagcataccaagtaagtgtaggattgataccaaggttctgtgatttaggagagaacgcttcatagaatacttgagactagaatttgataaagaataggatggaaggggtaagccaacaaggaaaggaaaaacaataacactatttttctttctcatcaaatccatatacatgatttaggtgacacacaagtagttctcaaacttactactgatagcaaggctacagccagaataataaaatcactagtgtccaaatagtatgaaaagcttttttcatactaccttaagttgttaaggcaaggtttctttccattgtgtttcttctacccaaccatgatccaagattaacactaataaaagacaccataaaataaagaggaagtatgtacaggatgcagccaccacatggctcttgttagctgtaaaaaaataataataataactctagtcatatttcaatgcttggaggaaatttggaatcaaagtgtatggcaaagttgaatttttgaaatagataaactttgaattatagctgttaaaattccctcatgaggttctggaattccctgtttgaataactggaagatggatcaaagcttctgaaagaattattacagcagtgttccaacactaggagatatatgtaaatcatttattttagtagcattttccatcacttgtcctgactaaaaaacatgagatctgaattcagatgataattactggctaaactttacccacagacatgggtggagtagagcttcacgttacaacacttaacccaggagaaacaaggcagggattagagatctatagagtgcttttgttagaaattctgaatgctcacaccctaatcctgaaacagagtgacagtggagtattcccctacctttcctttcacagtgtataccaaccttctcctgcttgttttcatgacataagcaggtttttatctagcctgccagaagctcaaaaaattgtccaaaggaccatccagcagctgttttgctaatggtagagtttagctccacacctggcattagacattcttgtcaatagagagccacatgggtgcagctccaaaggtgcagctgggtgcagctccaaaggtggccttaaggggcctccccagcctggctaccagctgcagtgcactgtggttacatatgtgcacagggaagggggtgtcatttgtggggagatgtgattgttttagtcaaatgatgcaaaagagatgttaacacaggcaaatttcatctctttaggggatccctctctcaccccttactcctaaaataaaaagaaattgtagatattggtatccagctcaatcagtactcatctaccctccccagtatttactttccatttatttctaacctagaggtcctcttctaacagaaaaccaagtactgtatgttctcttataagtgggagccaaatgaggagaacacatggacataaagaggggaacagcagacactggggtccactgaagggtgggagaagggagaggagcagaaaaatcaactattgagtgctaggctttgtatctgagtgacaaaataatctgtacaacgaactcctgtgacatgagtttacctacataacaaacctgcacatgtacccctaaaatgaaaatttaaaaaaaaaaccctctctgccatacaattacccaagaacaccaatcctctgtgtgtctccttaggcaatgtatgcctcttgttaaactaaaagaaaaatattaagagcctctcctatctagagcaaaccactttgcaaagaccactatgattagctttagttctgcgaatagagcagctgataaagtatgccttaataagtcttacaccactgcttattgggacagtgagtgtggattatcgttctcttaagtctcctccagctctaaaatgatataattctgtgatattcaaagccatgcatggagtcggccagagaactgaaactgaaaactaaaacctagctcaatcccataacaagcagaattgtcccagtaaacatttttttttgtctttaaatctctgtctgcagtctgcaatttgttttcagatgaattgtttctagcacacattttgataatccactgatggacggagttcttcctaatgaactggctgggcaaatggatgaacacacacaatcactgcacactgaaaaagccctttaatcctactcttctcttccaatgaactcacctctctccttactttactgaaaaattaaagaattcattgtgtgtgccagacttacatgtggtctaataatttcctatggaaaatgtactgtctagtaattgagataaatcaaattcacttaatctgctcaagtacttttactgacctctctggcttgggaggattttgaagaacaaatcttcctctaagactgaaacttaccaaagtatcctatagctggcagcaatgatggtttgggactgttgttttgttgatttaataaaatgttggcactggttagctggaatagacacagcaatttcttatacactgtcaatctggctgaatgatgcaggcatgtggaatagccattatacccttttcatagtgtttctgcgaaattctagtctctgcatattctgtattaacttctcaacatctcttcttatgggctttgtagaaaggagtaaaataagctaccaaagcgtcaggcattttatttagtttgtggtaggtgtgggcagcagcagaccaattccttccttgttgaagaagaaattgacttgattgctcagtttgacaacttttcatggggcagaaggacagctacctaaaagtacataactccactagtctataaagagaacaactattccctctcacataaccacatagttttatttttctttgctattgcttggcatttaggaagggagtggaagaaagtgataacagtaccacagaattagagtacagcccaactctggaatttgtgtccccacagaagtgggggaacacaaaaaaatgccccttatggcataagagccagctagtttatgaccccacgactactgataccctgatttagccttattttgtcttctgagtgcccccttggctctcccctcttgctccttatctgtgttcccagatcagcataataactttacatgtggcaggtatccagaaatgcttaccataatccttcagtgtccttgcagtcaagcttacccaaactgattagattctcctttcccatgttgagcagtccttcctctttttttcttattctacttgtccatttatctccctctgaaccttcacctgaatggggatcaaatatttcacgactacactaggggtaaaactcggctgaacaactcaaaccaacagctatagggtagactttctatataaaaaacagtttgcttgagatttgtaagacttttgttagaatgaaaaccaactttttaaatcagtaaggagtatgtaactaaaaagtttattaaataatgaaaactttacttcagttctaaattgtaggcaaaaaatagaaggaaaagattatagaaaggatcaaaacggggtagggaatggcaagcatctgctccatccagatctgaaggttatgcttgaggatattacctcttccactaaagaagaaatcagtctcaggctagaagcctacaggttggaggttcttgtctcttaacagttttgctcatgagccacaggtcacactttttgaaatcctagtttttcacttttcaatgaactgatctatgtttttttgttctcatgctgatttttacagctgctctcaaactgttggtgtcaaacaataccctctattatgccactcttctgagataatgctttttagtgctttctagactcaatgaaatattaatataacatttttttcttagcctgtggatctatgttgatggcaggcagaaaggtttacctgttaaattttcgatctttccaataacccgtgggctatacccttcttataaacttcacaagcaaaaagcaagtgtgtggccatagaagagttctgccttgagagttctatggcagtgtttgtcaaattccccaataacagaaactctttaaaaaaaattatctagagatacaaatatgatactagtgaatacttattactatgtgtcaagcaccttgcttttacatgcattctcatttaatcctcacagatgcttttatagcccccgtgaagttataattactataacgaatagtatcctcacaaatagcattatcctcatttttatgtaagagtaaactgaagctcagagaggttaagttaccttaaagtcacacattagtgagctgtgaatctttctggttctagaacccatgtttttaacgccccctggatcatgctgcctcctgatggggatgcgcggggaagattgttttttttttgtttgtttgtttttggaggggatttacacctacccaggtagaatcaggcatggcattctgtgaggctttatttacctggcttgtcctagatggggccaaaaggcttgacagcatttgtcatctggactgcattccatttagatattcattttgatgtggtaggtcttatagttctttaattttcatcagaaatatatgtacagttttaaaattaaattatcacaaaagcatctcctccctgttgctaaatttggttccccagatgcaaattttttttttaccattttgtccattacttctgtcaattaaatccctatgtctagactgaccttttcacaagatgctcaaatactccagtcatttctttgttctatttgttgtatgtttttaatggcaacatctcttttggaattcctatacatcctttgcctctgttttgaatcccaattcctgcatcacaagacttcttccttgtttactccattactttgtagcactaaagaaataaatcttgaggaaaagttataaaaggcaatatttttgagtcctcacatgttttaaaagttgttttactttgatactattctttagctggacatattaggatataatgaagacttttgaaggaattgttctattttctaacttccagtgttactgttaaaaagtcaaatgtcatcctgattctggatcccttgaacgggacctattttcttctcagttttgaggacttgtctttatcaccccagtactctgaaattttgtaactcatgttttagtcctttttcttttattcattttgctgggcagagtaggtcttttcaatctggaaactcttgtctttcagtactgggaaatttattacaaagtttctaggataattttctatctcctttcctttctttcttctacaattcctactagttgggtaccatattctctggaataattctccaactttcttttctctcattttttcatctctttgactttttgttctagtatttgtgaaatgtcctcaactttatcttccaaaacttctatttgaagtttcttacttcaaataactgtttcctgaaactttaaattttattttctatgtacaatcaatattgagacatttctcttagacctatgatgtcattcatctgtgacaaaatgtgcttcttcagaaaaaattttaccaacacaaataatttttgttatatagggtttaatcaggccaaaacaaaaatgtgcctttcagttcccatgttaattaaatttagtgcaaaataatttctttgaaacttgtcaaatatcacaaaatattggccaaaaaaaaaaaaaaaaacccaaaaagtagcttgtatatgtggcatgctgaaaatggagcttaagtgtacgtaactgtgaaataaaaagacatggagacaattccagcaatcagacttggccaaagcacagggcttttggcaatggcctggaacgaatgtggaatgcactgcccatttgaatcaaagtccagatggctatgatttctttttttccattttcagttcactgtagttctatgggcttttttgttttgttttgttttcaggcctcttagcaaaaatttaatctctggaaaatatttcatgtgaaaataccccatgtgtgtgtgatttctgtaggtgacaaaggtgtttttgtatcaacaatctctcattgcaaatgacaatgacaaaggcatgtgccaccatgcccagctaatttttgtatttttagtagagacagggtttctccatgttggtcaggctggtctcaaactcaggacctcatgtgatctgcctgcctcggcctcccgaagtgctgggattacaggcacgagccaccgcacctggccagttttaaagttttgaaaagcaaaaatagtaacagtacaagtgttttgagcctcattgctctcagctgaaaattaggataagatttatctcatcagggtttacatgtgttgtattgctttatatatgtagaatgtctaatgcatctgatacatagtaagcattcagaaaatggttgccattgttgtagcactagaatctgttcttagatactagcaatgttaacacaatacctcagtgatcaagaaactgactcaaattttttttcctgctcatttagtaccatccgtaccaaactgacagctgtcatccatttttcacttgtttataaaatatctatcttttgtgcattctgcattcttatttaattataaacttctcaaagacgaaatttatctcccaaaagccttgagcaaatctgaaactctcaaaatattattagctgactcaggttgacttttgaattcaatgttctttcactgccaagtccacttgctgctgaagggaaatcttaatttcaggcaaatggcaaattgctttactgtttacatttctttaaaagatttgctttgcttacatattttatgaataaaaattgctaatactgcacaataatttgaagaataattcttaaggatacaatcaacggaacttataattccaagggacctagggttgtttgggggttttgtttaacaaaaggttaagggactggccgatatgaatttggggtatggagggagagaaatgcctgtgtttgtgttcctgctctttgtaaggcaacattaccatgcctcttttctggagacatcatagaatcctgtgatccacagaagacccaagttccaggcgatacaactaggaagtccttgcaaagaaacatttatgtgtatctattcccatagcttagtctacagttaaacagactaactatagcttagtctagtagttctcaaacttcagtgggcacatgactcacctagggaagttataaattcttacctgaatctcctcaaaaattgcttcaatacctagagtaggacaagacactttcaccactgccaccctatgatgtgattctgacataagtagttcaaactccacagtgagaaagatggcctaagtccagggttatactcagggttgggataacagaaaataaaatggaatcttgccacttcttggccccaggaagtagctgagacatcttaaagaaacaggctccttgttactggaattagcctttgtctaccatataccactttcttatatgtttattaacctgccaagtcatttgtactaattgggagatttttaaagacaaccatcttttttattaacttaatgcttactcaaacattagacaagctgttcagatagtaaaactaagaaatcatttttctttcctcaacctgcttctggaacatatgttaccattcactgtcataatttcaaagggatgtcagtatagtggatgtccgtataatagggcaatgttgcctcctagccctcaagaatgtattacaagtatttttttattttcccctaaacagttatgaattccaggtgaaacccaaaaacccgcttggtgaaggcccggtcagcaacacagtggcattcagtactgaatcaggtaattacatcaacagtaattcccaaaaaggatgtaaaagggccacagtggagcaatgttttgcgtaggaagtttgtttgaaacccactacatgtactgtttcttgaatttctaaaaacccatttgtgggaaaaagcaaactgatgaaggtttagagaaacaccatgcatatttttcctcacttaaagacacatcagtttaatttaaaaagcataatgaatctatactcttccaaaaagctagtcaatgaatcctctcctgcatgtctagaatgaaaataccagtgagtacatccacaaagggaacccatgatagtttaataacagctgtcaaacttcccaattagaccttacaatctccaattccttaatgagatacatctgcacatacagcattaatatttgcataatttttataccaactgtagttcatggcatcttggtgatttttaccatgaagtttttctatcaaactaaaagcagcagcttttgaaattcaagtgaaagctggaacagcgacaaatgttcctaagtactcaaattacatgtaacagatacagctgaatacctaccaggcaggagattattcaatcaagaacaatttccaaaacaaagcaaactttcaaattcaatccttagcaaaagagtaccattttgcaaataagacttcttaacaagtgtaagcccccatcatcttcaccatgccactggaatgttggggttttacctagtaaggtctgacttttctatttatttctcctcagcggacccaagagtgagtgagccagtttctggtaagtacctgtctcaatgaggcacaactacatgcttttctaaatttattcaactgaacaggcatggcagaatctgaatcatgatttcgcgtttttccacttagtcttcttataacaccaaacagttgtgaatgtttacctacacattgtacaacactgaggacccatgatgttctgggaacaagttggacattttgaaatttgctttcactcatgcaccaggcttattactgtttaataaaacagccagtgtaatcccagcactctgagaggctgaggtgggaggattgcttgagcccaggagctggagaccagcctggcaacgtaatgagactccctctctacaaaaaatttaaaaataaaaaattagctaggcatgatgatgcacacctgtggtcctagctacttgggaggctgaggtgggatgttcacttgagcccaggaggttaatgctacagtgagccattatccagcttgggcaacagagtgagatcctgtctcaaaaaaaaaaaaagatattaacaccctcatttccacttttaataacaagtcatattaaagcagttgtctaaactttataacatgctacaaaaaagaaacctaaatttgctcctaaatgacactgtctacatccagctctgcagaggctattcaacacctaaacaccttaacatgctgctctcagatttatctattgacagaaacttactctggggtttacttgtttaaatccctctaatatttttggctccagtatttagcatggggggaaaaaaaggtatcagcaagttgacaaattttgtaaactgatttcttgaagtatctgacccaagagtcagatactaaactcaaactattttccttttgtagcaggaagagatgccatctggactgaaagaccctttaattcagactcttactcagagtgtaagggcaaacaatatgtcaaaaggacatggtataaaaaatttgtaggagtgcagctgtgcaactctctcagatacaagatttacttgagcgactccctcacaggtaagcagagctaccagctctgttttcagcccttaacttatgggaatgttttgcagcattgtacaacttggccttttcttaagagtttcaggcacgaatgggtgctgtaaacacaagttttcctctgagcaaaatgttacggaaacagttatcattcctagaaagcaaggatttaagacatgctattagaaggtaaataataaaaatgcaattataaaacagtgccatcatgacaaactggaatgtacattcactaaccatggtcaaactccattttgttacaaccatccagggataaaaaaaccgactgacaataaagtgactaaatctaacaataaccatggaatgaatataacatcttcaagatgctagaagagctacaaccccctgctccgtgcccaataggttataattttctatatttacagagtaaaaatttttaatgaataggcctggccctaacattaaaaagtagatttttttcagtcattcaactcttctaagtgctgaacacaaagcagcataaaagatatttcctattttcctaaagcttacctctccttcccttccttagtaagaagagatagacaatacataaataagtaaacatttcatagaggtactttaaagaacattttcaaaaaggtgaaggcctctctaaaaagttagttagcactagctaaggagaaaattgagaaggaactaaccacacaaaggtctagaggaaagagaaggtcaaaggcctaaggtagaatacacctggccagttccaccagtatggcccagacttagtaagtggaggggcaggcaggtgtgaaatcatgtggagtttgaaatcaggtaagaactttggattttattctgagtataatgggagactgctggggaaatttatggagagaacgaacattaactgacatgcatttttaaaagatcactaatccctgaaagggaggggaggaagaatacaggtaggcaagaaacattgttggtttgaactagggtaatagagaatgaggggagaaagtacaaaaacagtaatgatgatttcaaaattgtcacatttcaaagtaagaaagtaaactttatccttttaatttctggttcttcaggaaaattttataacataggtgatcagaggggccatggagaagatcactgccagtttgtggattcatttttagatggacgcactgggcagcaactcacttctgaccagttaccaatcaaagaaggtatgttttctgatcctcctcataagaacagagttttacagattaactcagaaagaaatcaagctgaggaaagcaagcaatttaaaaagaattctatagtactactgctccacatatctaggaaaaaatgaagacttcaatgtaagtttctcagcttagaaacctggagccaagggaaattacagacataatataaatgcattctacttcaagaaactctaaacttgcaaaaacagctataaaaaagcagtttcccaaacttaaatcactcatttattaatgttatgggttttgtcatactgagtgtacttgcgttatttttatttccttaagaaaaaaaattttttaactactgctatcataaatggaaaaaatagtacttaccttgcaagtaactgtataaatataattagaataattctgtgggaaatgaataacctctgtaaattgctaaagacccattggcaccaagctgtgtaatgaggactgaataagactgaaaattaatccttgtctaagcagtgcagaagggggtaaattaattgttcctattagtccagaatcacctggaggttctctaaataaactatttgattcgatttttcagtaacacattttgttcacgggcacttaaaaataccaacaatactgaaagatgacctactaagttctttgaacacataatgggcagtgaaactcactaccaaccatcccctcctaacttgacacggcaaatgtcaacaatttttcaggtgcccattttagccaaccatgactacacctcaggaaaaaacaccagaacttcttgctctcagttttctaaattacctcgcttcactaagattagccttcagctagtcaacgacatccttcaatctatgagctgtgagggcaaaaatataatacagcagctattaaaatgaaactattttctctctcaggttatttcagagcagttcgccaggaacctgtccaatttggagaaataggtggtcacacccaaatcaattatgttcagtggtatgaatgtgggactacaattcctggaaaatggtagatgctgcacaaagttaccttctgtttcatcattgcaaacaaaaatcattgaaaatactatgccgcattcatttaaagctattttgtttactatgtataaaagtctacaatctaattaatagcaatactagatgtttattattagaaaagattgctgagagtatttatcaggttttacaaagtcattttaagaaagcaagatactgatgttaacagaataacatttttggggaagctggctccctattcatggtattttaagagatcatttgtatattatttatcacactgttgtaatgatgttttgagatacttttataacaaaattaacatcaaaaaggtatatactttttaaaaaaaatttacttttattgatgtgtactcttcctattgatgagttaattccataaatctctacttagtttaacttattggatcaaattatcttcagcatgtatatctggggaaaaaaggtccgaattttcacatttatatttaaacttcaattttttatatttaaacttcaattttttagcaacagctgaatagctttgcggaggagtttaatagttacacattcatgctaatatacatttcctttaaacatccacaaattcttaaaaagattgaatcagtaaatttcatttcagctaaaaatggagtctaatatattgtttcaaaagatacatttttacccaccataaatgttacaatatctgaatatgctttgtcaaactatccctttatgcaatcgtcttcatattgtttttatgattctaatcaagctgtatgtagagactgaatgtgaagtcaagtctgagcacaaaaagataatgcacgatgagattgcctaccattttataggatatttactatgtatttatacgttaagacctctatgaatgaatgtatcagagaatgtctttgtaactgtttaattcaatctgtaataaaaatctaactaactaactcatttatttctattaaaaaggtattgtcctttaggcggggaatgggaatccttgctgcactgttgcagtcattctgaaaggacctttccctgtacttacctttcaacatgcttcaatcttatcaacgctacattttgtatttttcaaacaagtataaattctgcaataaagagatgtagtttttttttaagattgagtttttgtttgttatttctgaatggttcatcagtatgttaactataccttttatcgagaaggaaaatcactaagttttattcaggctctaccaacccccattatatctactgtttgtttatgtcctaaattaacctttcatcctatgaagtaataaagttcattttaaaccaa

SEQ ID NO: 207 - DNA, 33081 bp, Homo sapiens
attgaagaaaacatgagtatgaaatggaacctcagctctttcaatgacttccctttttgagttgactccgcctccatatgtagccttttcattttcatgaaagtgaagtgatttttagaattcttagttgttttctttagaagaacatttctagggaataatacaagaagatttaggaatcattgaagttataaatctttggaatgagcaaactcagaatggtgctacttgaagactctggatctgctggtaaaagcttctcatttattctacatttcccctttaatggggtatgtaattattatgacagtcaatggatgtgatttaaaagtgattggcatcaggagagtaaggagtggaaaaaggacataggcttatatggcagcacctttgatctgccatagattcaaaattgaagatgtgatatgggaatcagagtcggcattaattttgtaaaactgctgaggtgaaattaagtcaggaactaaagttaactgaaatgtactgagtatgaaaaaatagttgttagaaaagatagaatatgcagaaaggaatattgatagagagttaattacataaagaaagttatctactctgataagtgagttatctattttaagacttatttggacatgttaaaatcatttagcatttttagttttaaattagtgttgggttagagtaacgagaagatatgagagtaataacagcattaaagagtgtattatgtgataaggatacaggtagagatgacaagatttaatatttgagtttttcagatatggatatcatcacttaggtattgttctgctagctactatttggcaagcatcaagccaggtactggtgaaattatggtgaacatgatagatataattcgtttactcatggaacttatcctctatcagtgcggctaggtagtcttaaagatgggggcatccataattgaatatcaaggtggttagggaatagagaaatctcaggataccttccctgtgcctgctgggagaattgtccactactaagtttcattgatgttgtttccattttccaggttttaagggttgaccttgcaattctcgtttccaccaccaaccttctgctaatccgtcacctctaggttgcctataaacatgaacattttcaaaaccatttcactgaaactatatgagcctgggtatgaatgttttctgcctgccttgcaatttagaatgaagagttttctgtcttggtttgagcttctttgttaattaacctctgaaaccatctatcttctccaaagtctctttttgggaagatgctacttttgccctcttttctttttcacagacttcagaagacattttgtcaacttgagtcccttcaccattactgtggtcttacttctcagtgcctgttttgtcaccagttctcttggtgagtactttgtcaaatttacttacagccttagcccactctgacaagaacagttaaaaggcaaacaatttttctgaaggccaagtagcatctaaaaactaggtgacatgctccatgtattcaaaggatcagatattattaaaagcacacaataaaaatctaaccaaaatattagcatggttcctcaccaaatgaaataaactcacaggagagaaatgaattttacttaaagattagaaataatgttgaactgaaaaataggaaagaatacaaaggaggagaaacttcagaatcattaaaacaaaagtgaatttgggaaacacattagtaaattcaaatgccaaaatttatctaaaaatgtattgagagatgccaggttggtgggaccagattcctacataaagctaaaataatgccaaggaggcaactgagatcatctatcatctggggatgggaagagagtacaaagaggtttattttatggtagaaaatagcagaaaatatctccatcttaattttagataagtttcagtctagcgtttttaagatttatgctattttacatatacgtatgaaataagagttaaatttcttacaactagtcttttcatcttcataaattctctatcagccttctttctatcgaccttaggattttggagaaatgtaaaaagttcatccccataacgttttgtagcatcttatttaactcgaaaatgcttcacaggaattatataaattgccactattaaggctatccagccataaaataaagctattaaacactattgtgttacttacctttactggtcatatagcactgcttaatttgaaaccagtgatactgatacttatatttgaatgactgtgaaataacattcttctgttttaccatggataggactaggatggttctcaaatctgagtttgaaggataaataagtaatgtaaaaaaataattttctacttgctctttgcgaccttggccaattactgtcttaatccattgttgcaggaggaacagacaaggagctgaggctagtggatggtgaaaacaagtgtagcgggagagtggaagtgaaagtccaggaggagtggggaacggtgtgtaataatggctggagcatggaagcggtctctgtgatttgtaaccagctgggatgtccaactgctatcaaagcccctggatgggctaattccagtgcaggttctggacgcatttggatggatcatgtttcttgtcgtgggaatgagtcagctctttgggattgcaaacatgatggatggggaaagcatagtaactgtactcaccaacaagatgctggagtgacctgctcaggtaagacttgcattagtcaaagcctcaacacaaaatccttggtgggaaaaaaatatgtagatgggttaaaacctagaataagccactttcctgtaagcaatctagttcatgtataaaagtactccatccattgctagaaaaccacaaaacacgaggtcatttttttttaataaaaaaaattctgaacactgtgattaatgaggaggtgactggcttcaattttatacatgatcttagccaaaaagccaagaagtggtggtttaaatttgatattcagtaagcttactgtaacctactattcctatatcataaaaatatcatgacatctaagttatttccttgttctttcccagtgacttgttttgatatgttgacccacaaattattaccattttgtccattaactgataatcaacttagtaaatcaaaaaacaactatttctagcattaatacatcatttcttgttgtaggaaggattctttgaaagtataattgcttgaccagtgtgcaatgctagtcatttcatttacattgtgcttttaatttacaaaacatctccatatgttttattgcaattgaccccacaataactgagaaagtcatgtgtcaggcctttctgctgacaaatcccaagggcacatttctgatccaactcagattcctgggatccccatttctttttgtttgtttcattccttttttttttttttttttttgggacgaattgtcgctcttgtcccccaggctggagtgcgatggcgctatctcggctcactgcaacctccacctcccgggttcaagcaattctcctgcctcagtctcccgagtagctgggattataggcacctgccaccacacctggctgatttttgtatttttagtagagacagggtttcaccatattggccaggctggtctcgaactcctgagctcaggtgatccacctgcctcggcctcccaaaatcctgggattacaggtgtgagccaccgtgactggcctgtttcattaatttttatacaatcctctcacctcccagcctctctctctcccataggactgactatagaaaggacttatctctgtccaggcatcatgatgtgataagagaaacacacagtagcatctagaaaaatgctgaaataaattttcacatagctaatatcctgtgattttgtgcaagttgtcaaatctctctaaacttcagtttctgaggattcaatgatataatacatgtaaaactactggtacactgtttggtatgtaacaggtgctgaagatcctcatggctcagttctcttggtgactcagttctctttcttctttctccgcttcctcttcctcttccttctcctccttctcctccttctttcctcttatttttaaccactatgggaggtgtgaaatggggaataacaaaagtaacatctactgcaaagtttaaaattatcataaattttagcaggctcttatcataattattgctgtgtatagaactggctgtttagctaaaacagtgtagtacttttagctctttttttctgttgttttataactaccagtggagttaatcaatttgctttttgaaatttatacacttaaagctttaacctgagtcaaatttaaataacttgagtcgaatttatctatttctgtacaaaaaagagtatttacatctgtcctagtaatagatggaaacaaaacaaaacagaaagtttaaaaactttaacctgtaaacattttcctttgtaagtagatatagataaaaatcctaattgcttcctagattttaacatattaaaattctctaccgtgtggagctgggcaatgtccaaaatcaggcaccattttaaggacaacataaaatcccaagtgtccagaggaaacttcttttctaaaatcacttctaaatgaatgtaacttctgaactctggtcttttctctgctccagatggatccaatttggaaatgaggctgacgcgtggagggaatatgtgttctggaagaatagagatcaaattccaaggacggtggggaacagtgtgtgatgataacttcaacatagatcatgcatctgtcatttgtagacaacttgaatgtggaagtgctgtcagtttctctggttcatctaattttggagaaggctctggaccaatctggtttgatgatcttatatgcaacggaaatgagtcagctctctggaactgcaaacatcaaggatggggaaagcataactgtgatcatgctgaggatgctggagtgatttgctcaagtaaggactgatcttggctcattctattctccaggagaggacaaaagaaaggggtaataaatcttaagagcctgaactcttaagaacataatgaagtctgcttcttttgtcaccgcattttaacctaacttcaggttccagttctgatacctgtggactttttaccttaactgaaattaggagaaataggttagggaagtgcatagtgaaactgagatccaggtcataagaaaagaagaaagtgtttaggaaaagcccataaagaaagggagagaccgaaaagaaaaagaggggaaaaaggaaagaaggaagggctttactaggatattttgcactatgaagttttatgaccaaaccactccagttatcatctaatccacaaaagcctcctcattagcctcattaacccactccttcccaaatcatttttcaagttcacagaatcgaatcacttgttaaaaatcaatattggtttctcattaaaactttatttatactagatatgcattgtatctgtctagagactttcacgttgtatactcagactgggggcggggaaaatcgtttgtgtgtgcagagataccactcttcgtttttctgttgaattcttagtataaaaggagattgagtgtgtcttgaaccccagagaacacttaggaaaataagagtaaaaaatccctatcttcaccagatccctttctctctctctctctctctctctgtgtgtgtgtgtgtgtgtgtgtaaataaaggaacttccattcaaacttgtttaaaaagaagagaatactggctcacaaaactgggaaatccagagggtatagttagcctcatgcatggttggattcaggttcttgaacaatgtcatctgggttctatctctttctgcatgtcttgaacaagctttttcttgttgaacaatgtgatcagctatagcctgaaccacaatgaatggaactcctacaagaaagatagattttgttaggttaagaatgtgaagaatttggagtagaaaaaacacagactgtaccttccattctcttttacccatcaacatttctctaggcccccagttagcacatgctgacgaatcacaatcccacaatgaataacattgtgggaatgaaaacggaaactgccagaggaaacaaccagtttaatttattacagaatattcttcagaatcaacgtctgttctttgaagaatattgatttggggaaggtgaaaattgtagtactgaagcctcctttctctttgctctgcttttaaactaaggaagtggtcacaacaggttcaggtgtacaacacaggctaggtagtatcaatggagaatgcagtcagaggcaaaagggattgctaagtatggaggcaaactgaaggatgagggagtcacctaaacacatgcaaatatattttaaccagaaaaagtaaacagttctaacaagaactctgtggtggtcaaatagcaggtctctagatgaaattcagtccctgtatctcctgttagaaacacttcctgtagtatatgctgtctatactgagatgtcccatcttcttgcctgatccactcctccttccatcttgaatgatttccagtggtagtacagtacatcacagttttctctgtctccacttatatctctccccttttccttaactcatctcaggtatagctatttatagtctcatgttcttgcttccttatcgcagacctgttgtgtgtctctgttacagagggagcagatctgagcctgagactggtagatggagtcactgaatgttcaggaagattagaagtgagattccaaggagaatgggggacaatatgtgatgacggctgggacagttacgatgctgctgtggcatgcaagcaactgggatgtccaactgccgtcacagccattggtcgagttaacgccagtaagggatttggacacatctggcttgacagcgtttcttgccagggacatgaacctgctatctggcaatgtaaacaccatgaatggggaaagcattattgcaatcacaatgaagatgctggcgtgacatgttctggtaagttaaaaccaaaccaaaaccaaaacactaaacaaaaagaaaagcagaaacggaaagtcctgtgctccttaagagtaggaacgtgctccttaagaagtagaaatgcctagtaaattccttgctgggaattcctttatacctgtaatctttgacacattctttattcaactagtttggaaggttgtctgacggcattctctgtaataattactcagactgcttttatggagcacacttcaaactcagaatctacctggagctcagagagacaaaatttcctaggaatctgtttttaaatttttttaatttacttatttttttactttaagttctgggatagatgtgttgaatgtgcaggtttgttacatgggtaaacatgttccatggtggtctgcttcacgtatcaacctgtcatctaggttttaaccccccatgcattaggtatttgtcctaatgctctccctcccctttccccccacccattgacaggccccagtgtgtgatgttcccctccctgtgtccgtgtgttctcattgttcaactcccagttatgagtgagaacatgcagtgtttggttttctgttcttgtgtgttagtttgctgaggatgatggtttctagcttcatctgtgtcccttcaaaggacataaactcattcttttttatggctgcgtagtattccatggtgtatatgtaccacattttctttatccagtctattattgatgggcatttgggttggttccaagtctttgttattgtagatagtgctgcaataaacatacatgtgcatgtgtctttatagtagaatgatttataatcctttgggtatatacccagtaatgggatcgctgggtcaaatggtatttctagttctagatccttgaggaatcaccacactgtcttccataatggttgaactaatttacactcccaccaacagtgtaaaagctttcctatttctctacatccttgccaacatctgttgtttccagactttttaatgatcgccattctaactgggatgagatggtatctcattgtgattttgatttgcatttctctaatgaccattgttgataagctatttttcatatgtttgttgtccgcataaatgccttcttttcagaagtgtctgttcatacccttcacccactttttgaggaatctcttttaaagctgaattgctcatatctttctgccattgacaatttttatcaacccttgaaactacagtcccatttctaacaaaaatttatggtctatattattgtttcttaaaaagtcaggaaataagttacctataattttcaatgcatcagtatcagagaagaaaaaagacaaaaaaaaatcctctggaagctaacctccatatgtatcgatggtttaagtttatgtttcttttgcagatggatcagatctggagctaagacttagaggtggaggcagccgctgtgctgggacagttgaggtggagattcagagactgttagggaaggtgtgtgacagaggctggggactgaaagaagctgatgtggtttgcaggcagctgggatgtggatctgcactcaaaacatcttatcaagtgtactccaaaatccaggcaacaaacacatggctgtttctaagtagctgtaacggaaatgaaacttctctttgggactgcaagaactggcaatggggtggacttacctgtgatcactatgaagaagccaaaattacctgctcaggtatgactttcaatcaacttgttaagaagaagggtgtaaatttccagtactacctttgaaattgaaaagaaacattggtccttatgactagatcactctcaagaaaccaggaaatatctacacaaattccactgggagagtcagataagtttacaattcatgttgcactttagatagaagtgtttgggttttgctcactttggtttttgagtaatttttagatcaatagaggtataagattaaggaggattaaaatttaaaaaatagaattcaatatttctttcacaggatgtcaccaaaagatttaaaaaataaccatgttagataaactgacataaccttcagctccctctattgtactgtgaaagaattttctttttttttggaaaacctgtgaatatttcactgcaacctctttaaaaagctcaaaaatgagttgtaaactggttaggtttgtggataatctttagtattttatgctaattatatttatacaaatgttaactttgttgaaaagtgatgctttttaaataactctaaagtaaatgtaacttttactcatgcaacaaaaaggctttagaaaacacagtgtacaagaaaaccattaaacatgtagagacctcacagaatggaaacttgtacgtgctgcatgtcctctaaccaacaatatggctccagatacctcccaacctaggcatgcagtgaggggcatttccctgatgttacaaatggtgcttacctctagttaagtagaaattatcctccgattgaaaaaaggcaatcatttaagatataaatttgaatttctatattactttttaaaaaatattctggaccaggcaatataatcacatggtttaaacttcaaaataaaaaagtgtaaactcttcccccactactatccaattcttttcctcacagacaacttatgtggttggaatatttatatattatttgagatatttcatgtaaatacaagaaaatacaaacaaatctatatatagctatcatttgctttcattatccaaatggtggcatgttgtataaattgttttgtacctgaagtattcacttagtaaaatttcttgatcaaatttcacatcagtatttaaagagctgtctgaaattacttccatatctataacatttcttataatttattaccgtgtgtattcatttattcttttaattttttacctgacaaggttagccattcttttacctaaatttttttttaaaaaaccattatttggattttaaaaaattaatgttacttttatttcctttctaattcattaaaatttacttttctttctaataattctcttcagatttcctaaagtttgatttctttttggcccccaacttcttgagttgaatcttaagttttatttcttctgatttactaatataaatattttaggttatagattttccttctaaatttataatggtttgtatattttcttattaattgtattttacattgattagcattaagttctgctgtatctaaaagagaaacaaataatagtgactgaagaaagacagtgttcactttttctcatttaaaattagtcaaatagataagcagtttaaggctgttttggtgtctctgttgtcaccaagaaacatccagaatagatttgctgcagtaagtatcaaatcctaccggacaggaaggataagccaccccgcagctcagtgagttccttggaaagccaatctggtagacgaagtgctggcctctgagaaggtgtcttctgtccgctgtccttcatgggccccagtgttgctctcagggcagttcttcctggcacattattcttcacagttacatccaagtttggtttggagagtatctctatctaaggacagcacacctttcacaacccactttctgctaatattggtttagggacctttggattaaagattgactaatcaagggctgatgtcagctgccctcaaattcaacaaaaaagttctttccaaggttactaagcttctagtctacttgctttataacccaatgccatctgaaagtaactatagtccaagagcatataaatatactttgatctatgctgtgaccagcccttctctttaattattgaccactgccttaaggccgtttgaaactgtgggtttgggaggaaggacaagacctaaattccgtctttgccggtagactcattgcctttgtatctggagtatcaattttatcttctgacaaggctacagttttaccaccacctcaatttggggggacaggatacttagagttttttcttcaattcttcaattccaaattataggactcttgattaacaatatacaacacctgcaggcagaccatacccccttataaaattgatatttctcctcccatttctgcttgcattctgactgcttgtagtctgaattcatctttcttgtaaatgctaaaagtggcaaggagaatccacgtcatgcaaatattctgattttttgtagttttgtttcttgtactttgcccaataaattctgcattttttaagcatcagtgagcacacggttttcttttcaaagtgaggcttacccaaatattttaccatgtgtaagactccttaggtttttagcctctcacacctgagtcattaatgcattctgcccatcaactccattcaaccacacccatattttaggttgcattactagaataccttacttatggtaacatgttctaaattattcaggattctattcagatgtgtataatagaaatcatgaataacataaatttgcaacttaaggtgggctccgtacttcacagagctgtatttttgtttgctatttgccatgtgcactttttgtttccttttacaaactcttttgttatattgctgtaggttttggaagttcttctacttatgttgggggccttggtttttagctttttacatgttttgttagtaatatagtttgtacttttgtttctttatttacttgatactttcaatgatgacatactgtctctgtcaatgatgatatgctgtctctgtgcctgccaaattcaagctacgaatttgatcatctgtttaaattgtttaacttttatatagtacagggctatacagcttaaaagaaccaggagaattcaactaagcaggagaattggaaacaatttaagataaattgttgacagaaaaaggtctaggaaattttggccacaaaattactttgaatctcagacattttgtttgtgatgtctgtgtatgtactgtagaggacatctgaccttaagaaacagttcatttgagctatgctgtcttttaacttaggatggagaaataattctgagattatgatgatctatacttcttcagagtctgaaaagcattaaatgttgaaaatacattaaagcttctttaaatcataattgtatattttatttatcactaaacaaaaggaagtaattctagttaattatgtctctaattatgttaaagctctttgtagatctatttatttttctagaaaaagaaagaaaaacagattcagttacttatgccaggggaaaactgtagttgttgatcaatggtgctaaatccaggtgcaaaaatttacttaatggtttttatgtaaaaacacagtcagagacttagcagaaaaaaatccattaaagggatacatttccaatattctatccatgtctaaagagtaacgatataagcaaagcgacccataggatagattaacatgttactagcagattcacgaaataaaggctgaggatggagtctccaagtcactttctgagttggagaatttgtcctctgccttgactcaaatatgttagtacaaagaaaacaagaggatacttatagaagggactttttctcaattgcttaatgagttttcacaatggaaaagaaaatatttttgtttgtttgtttgtttgtttttcactggttttcttttggtttattttgttcaagatgggtccaaatgaaagagtaagaagttacaagaaaccagaatttggcttgatctaggagactgcctttacttaaagatttagggctgtccaaaagaggttgggatcatatgaatactagttaatgatatcttagagaaatttcatgcttgaataaagattcaaaaagaagaaatgaaagaccatcccactcaagggtcattaattatttgtattgtagaggtgttatttgctttaaactctgagctatgtttagaaagcaacatgtttttcatttcaaatttggataggaatttgctttgcgcagatttaatggataatgggtgaaattttgacatgttgaggtattctatattgctgtagtacagaacatggtcatattcgaaacattttctaagacatttttgtatcaggtgaaaggtttatgagagatgaaaggaaatcagagtatgtagattggcaagggctgatggtgtatctatatcattgtgatagtaacatcaagagattacaaaaattgttgatatttgatagcaggtatctataaaggacttaagaccttcagaaggtctaattttcaactgcattttctttatttctcttaaagaacaagttaaaagaaatagtttgtatctcttaagtactttatattgcctctgagtattttcaaagaaactcacttatcttgatgattgtgtttcttaacttgacaaagagcatcttcataatataaattccatttattatttctggtgtgtcttttctttatattttaaatttcagctacagtaagttacttataattcttcaatgacaccatgcatttcgtgaccatattccttaaagattgtttcacacactgtgtatttggcaaactcctcatcttttttcaagatccagtttagatctatgttattctctcccccatagtctaaaacagagtgaatgactcctttatttgttagttttatgtctaatacatatttctatttttgggttcatcactattaaaatatgtatatcttgtagtgaactgtgttcatggaggagaaggctattagtgagaaattgaacagccttgaaaagaagtagccttttcctaggtatataaggtagggaaataaattttaagtagagagaaaagtttctacagaggcacagaagcatgaaaattacggcatgcccaagcatctttaggctggagcatcaaattaggttgataaagtaatagatattaaagcttttaaggtaacagcatactattttaaagtgtactaaagaattagtgtttatcacctctccttaattttaatagctggacgaaattagggaatctatgaaaactgtttgtgctgcagtttgctcagaagaaaaatgggagtggtaatagggcctacctcacaggaattacacagtgagctataaatacatgttagctaatatgattatgattattatttttagtattatctatcttcactgacagactgaattctgtggcggcctttttaacccacccatcatcaaatgcctaaaatagagtcagagaacattacaggttgttacattataggtcattacattgatacttttggattaattattgcatacatgattattacagaaattataagaaattatgtaagggatcattgcatacattttaaggaaacgttaagtcatctaaaggaaaaacatcacatgaaaatatttgaaatttattaatatatttataatcatggcataaatttcttggaaaaaagactttgaagcaaggaaacaatttacgaagctattgtagaggtctgcatgacagatgatgacaaatcactttatggcaatagcaacaaatatgcagaagaagaaatatgctggaggaccaacagatatggtggttttctacatgttcaatgtatcatgaaagtcaacattctaggctctggaatatactgtctggcttcaaattctgttctcttactaattctgtagtaatttcttgtgtgaccttagcaaattactacacctcacctctctatgtttcagattccctgtctgtaaaatcagaatgatattaacaattatctcctaaggcaattttaaggattgaatgaaataatgtttgttaaatgcttattggaatgccatatatgtaatataatagacgctcacttaatattcactgctatcattattaccattatttgtggtgagataaagtgggtcaattttaggtggttctaatttggcctgtatatcattaattaagtaaagaatatagtgggcttgtcatacaataattcattcaactttgaatactttaagctccacatgtctaagcagatacgtttgtggatctaaaattaaagaaaaaagtatggatgaaaatatatttattagcagttgagacatgtccattgagcagatgagaaggttacggacagaactttgactcaaggaatacacgaaatgttttgataaagcactgtcagaaagaatggaggagaaaatgggacaagaagggtcacgtataccaaacgtaacagacgtcaaaaggaagaagtctgatgttcattctgaaaattagaagtatattgaaaagctttacatagaacaattcaaaaaggttgagcagaccccagattgcagtacatggaggaatgagtgcaagactaagagatagcgatagtagatacacattgtttgtggtctctaatgttattatgaataaagtaagcaaaattttggaagaacagagttatcattgcctttggggatggttggctgcacaaggtgaagtcccagaattctctcagatggatgagttcagctaggaatggggaggtctagatttatccatacccaactcgaggcagaaaagccaagacaaacaagtgtaggaaatcactgagcaccctggtctccatttcccactccacaccaccttcttcaccctcatcatgaatggaaatctggaaatcatattacctctcactgaaataatatttatttttcagcccacagggaacccagactggttggaggggacattccctgttctggacgtgttgaagtgaagcatggtgacacgtggggctccatctgtgattcggacttctctctggaagctgccagcgttctatgcagggaattacagtgtggcacagttgtctctatcctggggggagctcactttggagagggaaatggacagatctgggctgaagaattccagtgtgagggacatgagtcccatctttcactctgcccagtagcaccccgcccagaaggaacttgtagccacagcagggatgttggagtagtctgctcaagtaagacccagaaaacatctttaattggttctcatactgtgaaagggacagggttagggagtcatagctgtctttttctaaagccctgtctccttccaggatacacagaaattcgcttggtgaatggcaagaccccgtgtgagggcagagtggagctcaaaacgcttggtgcctggggatccctctgtaactctcactgggacatagaagatgcccatgttctttgccagcagcttaaatgtggagttgccctttctaccccaggaggagcacgttttggaaaaggaaatggtcagatctggaggcatatgtttcactgcactgggactgagcagcacatgggagattgtcctgtaactgctctaggtgcttcattatgtccttcagagcaagtggcctctgtaatctgctcaggtaagaggatgacgggcagccagtgatgggtcttaagagaaggtgtacatagggatgaagaacaaaagtaaaacgcagtgatccattttgaagggtcatgagaagaatgaatactaattcatgcttcagaatattaacctcatttgtcttttcagagggtgagcaaacctaattttgatggacttcttagttatccagtgcttactatgtgccaagcccatctcaaagcacctgatttatttcaaacttgttgaccatccaccttcccctctctctctaagctatgtttgtcctcaactcatccatataacatttcatctgactcccctaaccttttgtgtcttgtatgactgagtaccttggtgtttgcaggaaaccagtcccaaacactgtcctcgtgcaattcatcgtctttgggcccaacaaggcctaccattccagaagaaagtgctgtggcctgcataggtaagactctgtgacaaatctatgaaaatattaataacaagtggaatgctcattattaatagtttcatttctctttgcagagagtggtcaacttcgcctggtaaatggaggaggtcgctgtgctgggagagtagagatctatcatgagggctcctggggcaccatctgtgatgacagctgggacctgagtgatgcccacgtggtttgcagacagctgggctgtggagaggccattaatgccactggttctgctcattttggggaaggaacagggcccatctggctggatgagatgaaatgcaatggaaaagaatcccgcatttggcagtgccattcacacggctgggggcagcaaaattgcaggcacaaggaggatgcgggagttatctgctcaggtaaattatgcatatgacctttggtcataattacatagagaaaggactgaggaagggtagtgaggggtattaatcttaaagattttcctgaaaagttgatccaaaaggaactattgtgggagtcaggacaacagaagtctgggtttgatgtgctagtggtacttcatgagcaaggtagtgcaacattgtaaagagaaaagaccagaaatggtcttgtatatcatgaaaatgacaacaaagttaataatgaaggtttttaataaatatatttggggccagatattagatagcgatccaatagcaacacttgataattacagtattagtaaagaagtagatttaaagggacaagaagaaatatatatgttgcatcattctacagaaaaaaagataattactatgcccaagcaatttttcatggcagataaatgagacttacttgtcatagaaacaaaaagtagcatgaggttactgccctcatactgctttgtatacatggtgagttttagaaaacattctgaaatttaaaaatgtactatttcatatgtattatggggaacagaactatgattcagtaacttaaggaagtgaaaaactctgtatctcagaagtgatttattcctattttaatgacataaatctggtagaagacatgcactgcaaaactgtgaagtgtcagcaaatgaactgtcattttaagagatgtacacaaaacattgattttagtgcctgagtgtctaacaattttaactatcaaagacagttgcaaaaaaaggagaatatttttgggaaaaaatccaaactatgtaactgaaaaaagcctattagaatgattgagggtaatctaaagaggactctgagtccaaaaccaaagaccaaaaaactataatgtatttatagaataaataaaatattttaataatatctatgaaatcatccagaagttactaacgaattattagtaactgacatattgtactattgtacctatttttaaagccattcttacatcaaggtaaagggaaggagtctctgaatcttcagaaaagatgcaaaactactaattctatgtttcgctgcagaattcatgtctctgagactgaccagtgaagccagcagagaggcctgtgcagggcgtctggaagttttttacaatggagcttggggcactgttggcaagagtagcatgtctgaaaccactgtgggtgtggtgtgcaggcagctgggctgtgcagacaaagggaaaatcaaccctgcatctttagacaaggccatgtccattcccatgtgggtggacaatgttcagtgtccaaaaggacctgacacgctgtggcagtgcccatcatctccatgggagaagagactggccagcccctcggaggagacctggatcacatgtgacagtgagtatccatcgacctatatgaaaattccattctgcagccccgctatcatcttctgataatggacactggattttattttcctattctcacactggcttaaattgttagattgaattaagcaagaatgggtaacttgtgggtaatatctattctacctggatagtgtaactggttttatttaatttggcctgtagatattcaggatcagctattattattctaaagaatatcatactccccatggtctgcttgaaagatttattcaattgctttctctgaggaggagagaatatgtggtttaatatttgactgttgaatggtctaccttaccttcccatttttctttcaaatattatcttgttacactaatataaggagaaaagcagtcagaaatcagaaagatcaattctgaagtatttccacattctacaggttttttttttttttttttttgagacagagttttgctcttgttccccaggctggagtgcaatggcgtgatcttggctcactgcaacctctgccttcttggttcaagcaattctcctgctccagcctcctgagtagctgggattacaggcatgagccaccatgcccagctaattttgtatttttagttgagatggggtttccccatgttggccaggctggtcttgaacttctgacctcaggtgatccacccgccttggcctcccaaattgctgggattacaggtgtgagccactgtgcctggcctctacatcttcttaaactgtgagatttgtgacaacctgccagtttcccaagatcttgcctatttgaaagaatttgacatcacatatttataatgttaactttaatcatttaacatttactgggtcacattatgtatcttatgtgcaggatggaatatacctagttggctgtaatgacaagtcctcttataaaagataaattttgtaaaaatataaattttaggccaggcacggtggctcacgcctgtaatcggactttgggagtccgaggtgggcggatcacgaggtcaggagatcgagaccatcctggctaacatggtgaaaccccgtctctactaaaaatacaaaaaattagccgggtgtggtggtgggcgcctgtagtcccagctacttgggaggctgaggcaggagaatggtgtgaacctgggaggcggagcttgcagtgagccgagattgtgccactgcactccagcctgggtgacagagcgagactctgtctcaaaaaaaaaaaaaaaaatatatatatatatatacatatatatatataaattttaatatgcacattcagtaaaattttaaatagtttttttttttttttaagtttcaaatctctcttttcacctgtgaactcctggaaacttttagaagtcttagaaataggctacatgtctctgatttttcagacaagataagacttcaggaaggacccacttcctgttctggacgtgtggagatctggcatggaggttcctgggggacagtgtgtgatgactcttgggacttggacgatgctcaggtggtgtgtcaacaacttggctgtggtccagctttgaaagcattcaaagaagcagagtttggtcaggggactggaccgatatggctcaatgaagtgaagtgcaaagggaatgagtcttccttgtgggattgtcctgccagacgctggggccatagtgagtgtgggcacaaggaagacgctgcagtgaattgcacaggtaagtgccagaagcctggattgagcttggaatctctggcagcaaagaggggttgggcagtgatgtgtgttgtgtaaaaaccggatttatcagcacagggatctggtggggattctcagagaatcataatgtctctactgaaagaatgatgaaaacaattgttatacaacggccttcaccaaggagacacatacaacctatattccctgtgcagagaaagaaagactagaggactctagttttaggtgggaaagagtcatatacttggttgagaggtactaaggggtcagacaaggaaatcagaaggcttgttctatatatcatgcaaagaattaaccctctctctttcttttctcctacagatatttcagtgcagaaaaccccacaaaaagccacaacaggtatatcatggagtttatgatgatgagaccaattatctgcatacatagaatttttcttgtttagaaattttaggtcagacgttctgaggatttgatatttacctcagggatcaagtatttgacctaagagagaatcagtaactagggaccttgatcttttcgataagacatgatcatatctcttgatatttacttttacttaggtcgctcatcccgtcagtcatcctttattgcagtcgggatccttggggttgttctgttggccattttcgtcgcattattcttcttgactaaaaagcgaagacagagacagcggcttgcaggtttgagccaaatttggtttatctaatatgtctacaggataagggggttcttgtaagacgaaaatattagactcaagtctaatggccagaaagatggactctaaaagaggtttgagcagtttctcaaaacagagggaagggccaggcacagtggctcacacttgtaatccctacactttgggaggctgaggcaggagaattgcttgagtccaggagttcaagaccagcctgggccacacagggagctcccatttctacagatttttttcattttttaaatagagggaataagatttcagaggagaaaaggggtttaggttgcattgatgattcctgtgttctatctacatgcttaactggaacattacagaattgaaagttcagaatgaatatgttagatattgtttaggatgactttttacctaaacatttattttctcttactataatcaatctccttattacaaattttactgttctgttgagcaatgtattaggctctgaagatacagacatggacaataaatcttggtggaacttcaagtctagtggaagagatatatatgtaaacaaatacactacaatgtagccattttacattaataggaaaaaggaacaaaagtggcacagagaagggagtaattaactgaaaggggagggggattactggaggcttcaaagaggcttggggacaaatttcgaacatagaggctcagagaattgggtgaggaacattctagagaagaatatgtacaagtctagagaagcctaaaggatgaagcatttcttgtttttttcctgaggggcggggggagaaaagttgagtgtgaggagagaggctgctaagtctgaagaagagaaaaggcacaaattatgaagttcttatgtttcacataagattcatagtcattaaagagtatcatgtaggggagtgaaatggtcaagatatcttttaggaagatcttttggcaacgggatctaggaggattgaaggaggaccacttgactgacaggaatggcattttgtaacagttgaggtgaaaaatgaaaagtactataacatatatagtgagaatggaggggagaggaaagacttttagagatacttaagaaaagctccagtgagttatggaagactgctggcttccttgggtaaaaacagtgggttgtttatattaatacaatggcagtggggaagatttagccttgtgcctatttcatttgagtgtgcggaattgtaagggaagagcttggtagtagaatgggatagaaacaatagcagggataaagacgaggtatgtttgcagcgcttggaaaaaacacacttacagcaagggaaattttattatgatagctgatccctaacctagggatctctgttttcagtttcctcaagaggagagaacttagtccaccaaattcaataccgggagatgaattcttgcctgaatgcagatgatctggacctaatgaattcctcaggtctgtgggttcttggagggtctattgcccaggggttcagatcagtggctgcagttgaggcacagacattctactttgataaacagttaaaaaagtctaaaaatgtaataggaagcttagatgcatataatggacaagaatgactgaaaattattcttggagaatatcaaaattgcaatcatagggaggcctttagcttaagaggcctgtgattattcctgatagaggtatggaaagaaccatgcagaggaatattatgacttggacctcattttattaaaacagaaattaatcttacaaaagattgtcataagtgacagtttaacttttttctttaaattttgttgtgtatatttaaggtatacaacatgattttatgggatgtatatagatagtaaaaagcttactaaagcaaagcaaatgaacacacccatcatctgacatagttacccttttttgtgttgttcttgtggcaagagcagctaaaacctactcacttagcatgaatcctacatacagcacaatgttattacctataatcctcatgttgtacattagacctctagactggttcattctacgtatctgctactttgtatcctctgacctacatacgtctttcacagtttcttccattcccatttcctgtcattttttttctctagcttgatatttattatatttttccctaaaagtctaaaaccttaaactttcaatatctttattgcatgagaagccatacaaatccacagaactagccttatttctcatcacatcatgctgttttatccttgaacttctatttagcaccagtgcactaattctgcatctgggcaggatgactttactgggttggaagaaatatcccaaaacccattgtctttactccatgaagggtccctgaccttctgagaggggcctgcctcacttcttccatccaaagaattatgcatctgctactgtgtcagggaacatatttaaggaacatgtactgttactgtgtcaggaaacatatttaagaaataggaaagactttctctgccccttaaatcacacatgcttttcttcctagttatgggtggtgtttttagttgctcaaagagcctcacagttacgtgagaagaggtctggtttatttcccagtaattattttcttcctttcagaaaattcccatgagtcagctgatttcagtgctgctgaactaatttctgtgtctaaatttcttcctatttctggaatggaaaaggaggccattctgagccacactgaaaaggaaaatgggaatttataacccagtgaggtgagtgatgagaatttattagtcattgttcaaaacagctgcattccttttgaggactgagagctcttctggcattagaaagaaagaatgtatataaacatattttatttgcttatgtgcatatgtttgtatatgtatatatctatattgagaatatataaaagcttataaatataactgattcatctcttaattatacacacaaatagtaataacacatccatggagctaaggagaaactgagtaaacaaatacaaattaatcttttgaagacattacaggtatcatttcaggaaaaagataagacatattatacatctacatcgtataatacatgctatggtaaagactgtacaaggcactacagaaagtttgcctaagaaactttggggttgttgtaagatgatatgatatttaaggtaaactttaaaaataactgaaaaatagacagttccaaagaaaggacacagtatgtgcaaactagaggcagaaaaaagaaccatgcctttagggaactataagaagttttttattcaaaaacgtatattgaacgtatttatggtaacaagtggcaccgtgagcactgaagatagagataaaatctactattggcaaagacatgattgtttaataaaagatatcatagtctataggtggtaatatgaagaggccatgtggagagaagagaggtggttagaatctaagctgaaaaggctgcatagagccctgtaatgaatggtcttacctgctatactttatgttctctttcactgggggtctgttgaagaggtgatgatgagctttgaaagtttcagatgagacaagatgattagaattgcattttacaacttgctttcatgagaaaaacataaaaaaaaattcaaatgtgaacaagacgtatagttaagctatacatcaagagaaaaagattgtgaaatgagttactagatacattttctgtttttaaaataataatttggggaagactacatctagaaatgaaatgtagaaaaagtattttttatagaaatattatatattcctataattcatctacatattatatatctacattgtataatacatgctatggtaaagactgtacaagacactacagaatatttgtatatacgaaatatagattaagacaaaggataagagttggaactcttaaagtacatgaaatataaattgtgaatatctataaaatgcagagctaattttacatactatatatatacacacatagatacatagagttcttagaaactgtacagagcacaaaagggttaatatatgtgaatgtaaattgtatgtatgtgtatgtgtaacatctaatagataattgggcaaagctatgaaaagacaattgacacaaaatgaatttcaaatgacagacatttttaaatgtctggaggattgaaattataattaacaatgagctatcactttatacaaatcagactaacaaaaatttgaaataccatcaatatttattactggcgggaatacagagaaaaaggccatttcaaacactgcttttggaagtgtgagatatggtaggtagcctttggagaaagcaatctggcagtttctattaaaaattattttcaaagattcacagaccctttgacccaataattctatccctgagaatttcttcttaccaataaagtcactagtatgtaatgacaaatatacaaagattcctttctgccatgttgttgaaagtggcaaaaactagaaacaaagtgaatgccaattgatggagtaatgactggaaaaatgacggtttaggcaactaaaaaagaaaaaatcattataaaatataataatattccatttatgtattggctataattaaatacaatgcttacatctataaaattatgcattcatatgtgcataaagaagctaaaaattctagtgttgtaaactgagaaccatgaataatatttgatttataatctgaagcatatgaatgttttctgatgtgataaatgataattgaactacttttccctgaaagagtaatcactgctgaataactgcttcagaatcacatgagggtgcttttaaaaaatgacgattctttttttgtttttaatctttaagttctgggatacatgtgttgaatgtgcaggtttgttacataggtatacacgtgtcatggtggtttgttgtgcctatcaacccgccatctaggttttaagccctgcatgcattaggagcttaaatttgtcttaatgctctccttccccttgcccccaccccgcagcaggccccatgtgtgatgttcccctccctgtgtccatgtgttctcattgttcaactccaacttatgagtgagaacatgcggtgtttggttttccgttcctgtgttagtttgctgagaatgatggtttccagcttcatccatatccctgcaaaggacatgaactcattcttttttatggctctatagtattccatggtgtgtatgtgccacattttctttatccagtctatcattgatgggcatttaagttggttccatgtctttgctattgtgaatagtgctgcaataaacatgtgtgcctgtgtctttatagtagaatgatttataatcctttgggtgtatacccagtaatgggattggtgggtcaaatggtatttctggttctagatccttgaggaattgctacattgtcttccacaatggttgaactaatttacactcccaccaacactgtaaaagcatttctatttctccacatcctctccagcatccgttgtttcctgactttttaatgatcaccattctaactggtgtgagatggtatctcattgtggttttgatttgcatttctcagatgaccaatgatgatgagcctttcttcacatgtttattggccacataaatgtcttcttttgagaagtgtctgttcatatcctttgcccactttttgatgggttgtttgtgtttctcttgtagatttgttaaagttccttgtagattctggttattagctctttgtcagatgcctagattgcaaaaattttctcccattctgtaggttgcctgttcaccctgatgatagtttcttttgctgtgtagaagctatttagtttaattagatcccatttgtcaatttttggcttttgttgccattgcttttggtgttttagttatgaagtctttgcccatgcctatgtactgaatggtactgcctaggttttcttctagggtttttatggttttaggtcttatgtttaagtctttaatccatcttgagttaatttttgtatacggtgtaaggaagtggtccagtttctgttttctgcatatggttagccaattttcccagcgccatttattgaatagggaatcctttcctcattgcttgtttttggcaggtttgttgaagatcagatggttgtagaggtgtggtgttacttctgaggcctctgtcctgtgccattggtctatatatctgttttggtaccagtaccatgctgttttgataactgtagacttgcagtaagtttgaagtcagatagcgtgatgcttccagctctgttctttttgcttaggattgtcttggctatacaggctctatttttgttccatatcaaatttaaagtagatttttccaattctgtaaagaaagtcgatggtagcttgatgagaatagcattgaatctataaataactttgggcagtatggccattttcacaatattgattcttcctatctatgagcatggaatgtttttccatttgtttgtgtcctcttttctttccttgagcactggttggtagttctcctttaagaggtccttcacatcccttgtaagttgtattcctaggtattttattctctttgtaggaattgtgaataggagttcactaatgatttggctctctgcttgtctattattggtgtataggaatgcttgtgatttttgcacattgattttgtatcctgagactttgctgaagttgcttatctgcttaaggagtttttcggctgagacaatggggttttctaaatatacaattatgtcatctgcaacaagagataatttgagttcctattcctgtttgaataccctttatttctttctcatgcctgattgccctggccagaacttccaatactctgttgaataggagtggtgagagaagacatccttgtcttgtgctggttttcaaaaggaatgcttctaggttttgcccattcaatattatattggctatgggtttgtcataattagctcttattattttgagatacgtttcatcaatatctagtttattgagagtttttagcatgaagcactgttgaattttatcgaaggcgttttctgcatctgttgagacaatcatttggtttttgtgatttgttctgtttatatgatggattacgtttattgatttacatatgttgaaccagccttacatccagggatgatgccaacttgattgtggtggataagctttttaatgtactgctggatttggtttgccagtattttattgaggattttcgcatcaatgttcatcagggatattggcctggaattttcttttctttgttgtgtctctgccaggttttggtgtcaggatgatgctgacctcataaaatgagttagggaggagtctctctttttctattgtttgggatagtttcagaaggaatggtatttgctcttctttgtacctctggtagaatttggctgtgaattcatctggtcatggtttttttttttttttttttttggttggtaggctattacttactgcctcaatttcataacttgttattggtctagtcagaaattcgacttcttcctcgtttagtcttgggaggatgtatgtgtccaggaatttatccatttcttttagattttctagtttatttgtgtagaggtgtttatagcattctctgatggtagtttgcatttctgtgggatcagcggtgatatcccctctatcactttttattatatctatttgattcttctctcttttcttctttattagtctggctagtggtctgtcgattctgtttatcttttcaaaaaaccagctcctgggttgattgatttttgaagggtttttcatgtctccatctcctttggttttgctctgatcttagttatttcttgtcttctgctagcttttgaatttgtttgctcttacttctctagttcttttaattgtgatgttagggtgttgattctaaatatttcccactttctgatgtgggcatttagtgctatacatttccctcttaacactgctttagctgtgtcccagagatttttgtatgttgtgtctttattctcattggtttcaaagaacttcattatttctgccataattttgttacttattcagtagtcattctggagcaggttgttcagtttccacgtagttgtgaggtttcgagtgagtttcttaatcttgagttctaatttgattgcactgtggtttgagagactgttatgatttctgttcttttgcatttgctgaggagtgttttatttccaattatgaggtccattttagaataagtgctatgtggtgctgagaagaatgtatattctgttgatttggagtggagagttctgtagatgtctattaggtccatttggtccagagctgtgttcaggtcctgaatatccttgttaattttctgtctcattgatctgtctaatattgacaatggggttttaaagtctcccactactattgtgtgggagtctaagtctatttgtaggtctctaagaacttgctttatgaatctgggtgctcctgtattgggtgcatatgtatttagtatagttagctcttcttgttgcattgattcctttaccattatgtaatgaccttctgtgtctttttttaatctttattggcttaaggtctattttatcatagactagaattgcaacccctgttttcttttttttgttttccatttgcttgttatgttttcctccatccttttattttgagcctgtgtgtgtcttgaacatgaggtgggtctcctgaatacagcacgccgatggatcttgactctttatccaatttgccagtctgtgtcttttaattgggggcatttcacccatttacatttaaggttaatattgttgtgtgtgaatttgatcctgtcatcatgatgctaactggttattttgcacattagttgatgtggtttcttcatagtatcattggtctttatattttggtgtgtttttgcagtggctggtactagtttttcttttccatatttagtgcttccttcaggagctcttgtaaggcaggcctgatggtgacaaaatccctcagcatttgcttttctgtaaaggatcttatttatccttcactcatgaagcttagcttggctgaatatgaaattctgggttgaaaattgtttcctttatgaatattaaatattggcccccactctcttctggcttgtatggtgtctggagaaagttctgctgttagtcagatgggctgccctttgtaggtaacctgacgtttctctctggtgcccttaacattttttcattcatttcagccttggagaaacggatgattatgtgtcttcgggttgctcttcttggggagtatcttagtggtgttccctgtatttcctgaatttgaatgttggcttgtcttgctaggttgtggaagttctcctggataatatcctgaagagtgttttccaacttggttccattctccccatcactttcaggtacaccaatcaatcataggtttgttcttttcacatagtcccatatttcttggaggctttgtttgttccttttcattcttttttctccaatcttgtcttcattccttttttcagtaagttgatcttcaattactgttatcctttcttccacttgatcgatttggctattgatacttgtgtatacttcacgaagttctcatgctgtgtttttcagctccatcaggtcatttgtgttcttctctaaactggttattctagttagcagttcctgtaacctttaatcaggttcttagcctccttgcattgggttagaacatgctcctttagctcagacaagtttgttagtatccaccttctgaagcccacttctgtcaattcatcaacctcattatctgtccagttttgtgcccttgctggacaggagttgtgatcaattaaaggagaagagccattctggtttttggaattttcagcatttatgcacttgtttttcctcatcttcatcgatttatctacctttgatatttggagctgatgacctttgttggggtttttgtgtaggggtcctttttgttgatgttaatattattgatttctgtttgttagtttttcttataacagtcaggcccctcttctgtaattctgctgcagtttgatggaggtccactccagaccctatttgcctgggtattaccagcgaaggctgcagaacagcaaagattgctgccttctcattcctctggaagtttcgtcccagaggggtactggcctgatgccagccagagctctcttgcatgaggtgtctgttgacccctgcttggaggtctctcctagtcactaggcatgggggtcagggacccacttgaggaggcagtctgtcccttagcagagctcgagcgctgtgctgggagaattctccttgtcaggatctgctgctctcttcagagccagaagacaggaatgtttaagtgcgctgaagctgcacccacagccgccccattcccccaggtgctctgtcccagggagatgggagttttatctataagcccctgaggggggctgctgcctttctttcagagatgccctgcccagagaggaggaatctagagaggcaatctggccaacggcctccttggcctccttagcgctgtcacgggaaaaccgtctactcaagtctcagtgatggcagatgtccctcccccgaccaagcttgattgtccgagttcgacttcagactgcagtgctagcatcgagaatttcaagtcagtagttcgtgacttgctgcgctttgtgggagtgggacccgctgagtgagaccacttggctcccttgcttcagccccctttccaggggagtgaaaggttctgtctccctggggttctaggcgccactcagttggaaatgcagaaatgactcagttggaaatgcagagacttctgcgttggtctcactgggagctgcagactggagctgttcctattcagccatcttgccagctcctataaatggcatttcttaatcttactgtatttccatggaataaaagtaattcttatgcacactgaagttaaaaaaaaatagcatttaaaatttctgctcaggaaagtagtataatttttaacataagtgagtttctctttgtgttataatgtaatgaattcttatacgcatatggagaggaaaatgacatttttctatttatggttttagttcagcctttaagataccttgatgaagacctggactattgaatggagcagaaattcacctctctcactgactattacagttgcatttttatggagttcttcttctcctaggattcctaagactgctgctgaatttataaaaattaagtttgtgaatgtgactacttagtggtgtatatgagactttcaagggaattaaataaataaataagaatgttattgatttgagtttgctttaattacttgtccttaattctattaatttctaaatgggcttcctaattttttgtagagtttcctagatgtattataatgtgttttatttgacagtgtttcaatttgcatatacagtactgtatattttttcttatttggtttgaataattttcctattaccaaataaaaataaatttatttttactttagtttttctaagacaggaaaagttaatgatattgaagggtctgtaaataatatatggctaactttataaggcatgactcacaacgattctttaactgctttttgttactgtaattctgttcactagaataaaatgcagagccacacctggtgagggcacaaa

SEQ ID NO: 208 - DNA, 88101 bp, Homo sapiens
ataacctccactctgaaagcagtcttcacagaaacttttcacagaagtcaaatagttaaagcaaattctagatacatggtagagaccaggagaaaatatgaataactttcttctaaacaaggagctcagtggataaaccatacctctagattccttgcttccattttcccagaagtaagttcactgtattttttctgttttgttttgtattttgcttttgtgtgtgagtttgtttcagaggttttgtcttttcttattcctatcacaaaattataaataaacctttataaactgaatgacaatcatctatgcagaaattattttgaaaaatattgggctactttaaagattttatatctggtaattaatattagataaataaaaacattgagttagaatgttttttaaaaaattatgcaaacattatgttgttttaaacataactgagtgtagaaataagtttaaattggctaaaaattttttgtgaagagcttagagttttaagaattgggttggaagactgagttgtttttgaagttaaagttatctactttgattgcacaataatgtagggcattttggataagtgttcttctgactttaagactgtttaccaagagcacttacagaaatatttttattgttcctatcgctcactcttagtctataagaattttagaaatgtaagattctttctaggatcttttactcgttggatacagtgagttgaatcagaatgtgaaatatgtagcttctctttaccacaatgttatttaaaatgtacattggtaaaaagaattttcatactcctatagtgaatacatgttgttctgaattttacaacagtataagaggataaaaatgagtcattacaatttgagactatttgccatatgtataataaagtattcatgtttttgctagcctttacataaactgcagaacatacaaaaattggaaagaaacaaagttggcaataatactttacgatggaagatataagggattggagtcagactggagtttgcatgctacctaagactgtagctgattccatagtgaggagatcatcctcttggccaatgtctattaacttcgccagtgaattatgcatttctgtagagaagctgtgatatatttgggcttgtgcatgaggtggagtgtagggaaacatcacactctggggactgttgtggggtggggggaggggggagggatagcattgggagatatacctaatgctagatgacgagttagtgggtgcagcgcaccagcgtggcacatgtatacatatgtaactaacctgcacaatgtgtacatgtaccctaaaacttaaagtataataataaaacgaaaaaaaaaaaagaaattcctcctgtacagagcttgcattggcggcagctgctttaagaacccagaaacttttgccctctctgtaggctagctcactgtgaaaatatcccatggattttacctaaaattgcttacagagagcggcattatacttctatagataattgcatcagtaaccagagaggagaagtacagcagcagactaccctctacccccggtaggagtagtagcacatcacagtttcagcaagttcaatcttgagcaaagaacatgatgtgattgtttgtgggtatgtctgtatacggagtgtgattttaggtaaggagagccttgcacagctctcttaaaagtatccatgctgaattttctgcaccttaacctaggctgctttactcttggaactgtctttccctcttctccttccatgggctctctgacctctttacttggtctgcttccacttaggcctgcccctcagcctcattgcatggccatgtgtaggttcttcttctagcagtgttctctgagactgctgtggctaatgtgccttctgttgcaactgacccctggacaccttacttgagatttggctctagaaagtagcaccaccctgtgtgtgatcctgtcccataaatgagatgatggcttcagttggggctcattcacttctcatcactatggaggagttcatagaaactgcatggccaacatggcatgcatacggagggagatcacttgcttcagaagtcaggacttatgagccaaatgatggtcttcagggtggagctgctggctttgtgctcaaaagtctggacccattcttccaagtcatgtccttcacatgcttcccagaaaactgatgatggtaccttccagaatctctttactttctataattcagcttaggtagcctgttttctcccacggcaaagaccatttgaaagcactctagtcctacagttttcaggagtggcttagcaaatcctatttgtgtagcagtggttgattgaagttctggaaagatgtggtgctcttattatgcactgaattatcttcttctgggaagtattttatgtgcctgctgcaataaactgtatgtataaattcccctacaaaatcaccccccatatacagacatacccagaaacaatcacatcatgttctttgctcaagattgaacatgctgaaactgtgatgtgctactactcctaccagggggtagagggtagtctactgctgtacttctcctctctggttactgatgcagttatctatagaagtataatgccactctctgtaagcaattttaggtaaaatccatgggatattttcacagtgagctagcctacagagaggacaaaagtttctgggttcttaaagcagctgccgccaatgcaagccctgtacaggaggaatttctacactccacctcctgcacaagcccaagtatatcaaagcctcgctacagaaatgcataattcattggcaaagttaatagacatttgatggtaaaaaatgaatctactttgtatgttctttaaattgaaaattgaatcacatttctacacaacaacaggcggatcacaaggtcaggagatcgagaccatccgagctaacaaggtgaaaccccatctctactaaaaacacaaaaaattagctgggcgtggtggcgggcgcttgtaatcccagctactcgggaggctgaggcaggagaatggcatgaacccaggaggcggagcttgcagtgagccgagatcgcaccactgcactccagcctgggcgacagagcgagactccatctcaaaaataaataaataaataaataaccaggataattagattggaattcagcagagtgttaaaataactagaaggcatttgtttgtaaaaagagaacagagataataaatacttttgagttttcataaaataagttatagtttcttagaaaagtatttaagagtaaccataaaagacatataaccaccttttacatctttgggacaggagaagaagtgaagaaggagaggaaaacattttcaattcaatagaaggtaaagatgtagacaaaactagaagcaaaagaaaagtaggtttaacgtgagaataagatagaatgagagatcatccaaaacaaaaattcatacatggtttaatgcatctcttaaaatatagttatctatcagtttagatttctaaacataatgcattgatagttttttatatagtaaccaaatatttaaaaatgcagcaaaaggttaacaacaaagagatagaaacagatacattaggcaaatattaacctacagaaacctagtgtctccatattatcagaaatagaagcaacctattactgaaacataaaaaagcaatgttttatgcacctagctacctatgctttaaatgcacttgctgaaaactaacagagatataataagaaattgccaaacctattattagagtggaaatttttaattgaactctattatgaaatgattgatctaggaaatataacattagaaaggatgctgaagatttgaagaacacaatgaaaaagattgaatagatacgtacaaaacacttcacctaaatggtgagttacaggtatgttaggtgcacgtggaacactttcaaatattaaaatatgctgcaccagcgaggaagtcttaaggaattttaaagaagcagtatcttactgagaagtcatttctttggtcacaatataattgttagaaatcaaaaataaaaagtcactaaaaacaaagaaacttcaatatagtgaatgctaaagaggtaatcctaagtaacatatgtatggtctattgccacatttatgttacatagcaaaaaggaaataaacccaaataacaacacacagcaataagcatttgtagtgtggtgtctgcagtggttcctaagaaactgctgatcttggataggcttgatggtatctctgggaggggactggctagcactctcaactggatgactgagaggactcagcttggtttcattccgcagtaggctaggccaggtctgctctcacagcaatggaagaaacaaaaaaacaagcagatacactcaaggtctcgggaggctgaggttcagaactggtgcgacatcacacctcccttcttctcttggcccaagtactagcctgccttgatgacaaaaactccaaaattaccagacaaagggtggacacagacagatggataattgggtcactgatgcaatcaatcactcaactccagaatccattttctcagccactctgctaacattagttcgttatttcagccaagaagccaaaggaaaaagtagcaaaaccaacccccaaaaagagtagaaataaaaccgtgaaaagtaagaggataaattaataaattagaaaacatagtaagcaatgaaaatgatgaaacagtaaactgctgttttgtttaaaaggccattaatacattcaaaattctagcaagactaatgaataaaaataaaaagaagcttaaaaatagaagaaaacatacatccatttataataggttttcaaaagtatttttagttatagatattttaaattcatgctaataaatctaaatatagtttgaagccaggtagcaggatgcctccagctttgttctttttgcttaggattgttttggctacgcgggctcttttttggttccacataaaatttaaagtagtttttttctattctgcaaagaaagtcaatggtagcttgatgggaatagcattgaatttataaattacttcgggcagtatggccattttcatgatattgattcttcctatctatgagcacgaaatgtttttccatttgtttgtgtcctttcttatttccttgagcagtggacggctttttgcttgtctattgttggtgtataggaatgcttgtgatttttgcacattgattttgtatcctgagactttgctgaagttgcctaccagcttaaggagttttggggctgagactatggggttttctaaatatagaatcgtgtcatcagcaaacagtgacaatttgacttcctctcttcctatttgaatacctttatttctttctcttgcctgattgcactggccagaacttccaatactatgttgaataggagtggtgagagagggcatccttgccttgtgccagttttcaaagggaatgcttccagcttttacccattcagtatgatattggctatggctctgcagtaaagagctcttgttattttgagatatgttccatcaatgcctagtttattgagaggttttaacatgaagggatgttgaattttatgaaaggccatttctgcatctattgagataatcatgtggtttttgtcattggttctgtttatgtgatggattacatttattgatttgcatatattgaaatagccttgcatcccagggatgaagcgacttgatcatggtggataagctttttgatgtgctgctggatttggtttgccagtattttattgacgattttcacatcgatattaatcagggatattggcctgaaattttccttttttgttgtgtctctgccaggttttggtagcaggatgatgttggcctcataatgtgagttagagaggagtccctctttttcgactgtttggaattgtttcagaaggaatgctaccagctcctcttgtaccactggtagaattcagctgtgaatctgtctggtcctgggctttttttgattggtaagctattaattactccttcaatctcagaacttgttatcagcctattcagggatttgactttttcctggtttagtcttaggagggtgtatgtgtcatggaatttatccatttcttctagattttctagtttaccatgctaactgacttcaaacaacactaggaggctacagtaaccaaaacaccatgatactggtgccaaaacagatatatagaccaatgaaacaggacagagacctcagaaattacaccacgcatctacaaccatctgatctttgacaaacctgacaaaaacaaacaatgtggaaaggattccctgttaaataaatggtgctgggaaagctggttagtcatatgcagaaaactgaaactggaccccttccttacaccttatacaaaaattaactcaaaatgttttaaagacttaaatgtaaaacccaaaaccataaaaaccctagaaaaaaacctaggcagtaccattcaggacataggcatgggcaaagacttcatgactaaaataccaaaagcaattgcaacaaaagccaaaattgacaaatgggatctcattaaactaaagagcgtctgcacagcaaaataaactatcatcagcgtgaacaggcaacctacagaatgggagaaaatttttgcaatctacccatctgacaaagggctaatgtctagaatctacaaggaaattaaacaaatttacaagaaaaaaacaatcccatcaaaaagtggacacaaaatatgaacagacacttctcaaaagaagacatttatgtggccaacaaacaaataaaaaaaactcatcaccactgatcactagagaaatgcaaatcaaaaccacaatgagatatcatttcatgccagtcagaatggcgattattaaaaagtcaggaaacaatagatgctgacaagactgtaaagaaataggaacacttttatactgttagtgggagtgtaaattagttcaaccattgtggaagacagtgtggcgattcctcaggatctaggatcagaaatacaatttgacccagcaatcccattactgggtatatacccaaaggaatataaatcattctactataaagacacttgcacacataatgtttattgcagcactatttacaatagcaaagacttggaaccaacccaaatgcccaacaatgttagactggctaaagaaagtgtggcacatatacaccatggaatactatgcagccatgaaaaagaatgagatcatgtcctttgcagggacatggatgaagctggaagccatcattctcagcaaactaacacaggaaaagaaaaccaaacaccacatgttcttactcgtaagtgggagttgaacaatgagaacacatggacacatcaaggggaacaatgcacaccagggcctgttgaggggtagagggcaaggggatgaagggcattagaacaaatacctaatgcgtgcggggcttaaaacctagatgacgggttgataggtgcagcaaaccaccatggttacatgtatacctatgtaacaaaactgcacattctgcacatgatcccagaacatgaagtaaaataaaaataaataaataaataaataatctaaatataatgaatacttttcagtgaaaattatcaaaattggatcaagttgaaacagacaacttgaatagaccagtcatatttaattaattgaaccttcgttaacagcaatgataatttagcccatccttatcccagaaacaacaggctcataaggttttatcagcaagtttactagccttctaagatcagatcttccatgtgttacaaactgccctggagaacagaaaaagagaaaatgctagccataataaagctaacataacactgaggctaaaagcagacaagcacattgtataaacaattaaattatagtacactgtaacttatgattatacacaatcccaagtaaaatattggcaaattcaattaagtagtatttaaaaataccttatgacaaattatagtatttgctggaaaacatgagagaaaacatcaatctaatttacatgttagtagattatattagatataatcataatcacaaaagaacataagaaaatatctaatgtccatgtagaagaaaactcaataccataaacattttaattatatctgaatgaatcaataaatttaatgcaatagtaatcagacctttatttatcatgaaacttgtcaaaatgtttccaatatgcatttagaagagtataagtagctaatataaattgaactgtagaataaatctaacaaaaattatttaatggctcaactacaatacaatttattttctttctttctctctctctgtctctctctctctctctctctctttcttttgatggagtctcactctgtcgcccaggctggagtgcagtggcgccatcttggctcactgcaacctctgcctcctgggttcaagcgattcccctgcctcagcctcgtgagtggcggggattgaaggtgcatgccaccatgcccagctaatttttttgtatttttagtagggacagggtttcaccatgttgcgcaggctggtatcaaactcctgagctcaggttatccgcctgcctcagcctcccaaactgctgggattacaggcatgagccaccatgcccggccaatacaatataatttcttgctcattaaactaatatatcagtttatcttcccatgataatctaggaaactgaattccatccgtcttttggccggctgtcttctaaggcatctacctatcagaagggaaaagaggatatagagagactcacctacttcctaatatcatgacttagaaatggcacattatttcttctgcatatattccattgactaggaagcaatcttatgtcattgtgaatggagtatagctctgtgctcagaaagaaaaagtaataaattttggtaaaaagcggctgggtgcgggggctcacgcctgtaatcccagcactttgggaggccaacgtgggcagatcatgaggtcaggagttcgagaccagcctggccaatatggtgagaccccatctctactaaaaatacaaaaattagctgggcatggtggtgggcgcctgtagtccctgctacttgggagactgaggcaggagaatcgcttgaacctgggaggcggagattgcagtgagccaagatggcgcccctgcactctagcctgggccacacagtgagactccatctcaaaaattaattaattaattaattaattaattaattttggtaaaaagctagcagtttctgtcacaaatagtaagctcccagaagagccaagacaattttgaaaaaaataaataagatgaagaacctgttctagaatttatgaaggcttattatgaagttctagtaactgctagtaactagactatgtgtgagaagtatacaaagagattaattgaaaactagaatacttcaaagtgcatacacgcataatatatatacatatgcgcacacacacacatatacacacaaacataaatacaaacacacacatatctgctattcgagagagaaggaataacaaatgaatacggaaagaaggaaccagaaagtagttcatgttggaacaatatgcttgagaaatgcagaaagaaaaaaactcatcaccaacgacttaggtcactctcttaggtcttacacaaaaataaactcagatgtatgaaagagtacatctttcatgtactcttgacaaatacttgagattattagaagaatatgaaggaatgtgcatttatgacttctgaaaaggaaagtgctttctaaacaggacacacacaccaaatacacaatcaccaaggaaaaggttgtttgaccacaacaaaacttaaacttgaatacaatagaagaaaattagagattgacaaaattaataactagcagcaaacaaatatctaaaatacataatgaactcctgcaaataggtatgacaaaaaaaaatcaactgagtacaaaaagctatttccagaagtctaagtggccattcaacatataagacgacgctcaaattctatgaaaaacaagacaacagacaacacaaattctaatactgagataccctacacactccatgtttgtaaataatttggctctgagaagctgcaaattgttttctctgtgttcctgttccaccctcaactttcaaaggccttgtgcacccaagcagtaaaggagaccccctccattatcttacccttcccccatccatagactgccatagctttttgctcagtgcagtgcttgagatatgggcaggaggaactctagatttcctgctccagcctcagtattaggtactatagatctggcccttgagatggggcttcctcaacatgtttttctccctacataccagccaattcctaccttgtatctgttgagaggttctggacctgtgagagcgtcctctcccccgccgtggtgagagcctgtctctgctttgtatccgtgctgggtccttgttgcaaatctcagctgcaaattatctttgcttgggaatgggaactggaagcttcctgccccacctgcagtggtagcaggctgttgctttttaccaggtgcaaggcttttatcatagagcgacgtggtttccttcctctccctccacaaagtggttttttgcttctacccataacttagcagcagaaattcacttggaacaggagtaaaggttgggggaaggggtggttggtggtttacagattgcccctcattagctgctgatttttgctttaactcctccccaagatgcaataacagcttgttttgtggggctgacagggattcctgtccttctaccaaggtttctagatttgccctttggaaaaaatgttctgagacatgggtagattttgtggcctgtgagctactgggggtctttcaggtctcttgtttgcatatgtatgtatatgtgtatatatatatatatatatatatatatatatatatatatatataactttaagttctgggctacatgtgctgaacatgcaggtttgttacatagatatacatgtgtcatggtggtttgctgcacccatcaacccatcatctaggttttaagccccacatgcattaggtatttgtcctaatgctctcccttccctttcctctcaccccccaacaggacccagtgtgtgatgttcccctccctgtgaccatgtgttctccttgttcaactcccacttatgagcgagaacatgaggtgtttggttttctgttcctgtgttattttgctgaggatgatggcttccagcttcatccatgtccctgcaaaggacacgatctcattctttttcatggctgcatagtattccatggtgtatatatgccacatttttctttatgcagtctatcattgatggggatttgggttggttccaactctttgctattgtaattttttttaatgaatactaggtgaagcctgtaaaaaaagagttgacaaatgtgctggggtcctggtaattgtaaacaaacacgcaagctgtgggtccacactcagccattaaaaatttaacatttcagctgctttctccctacctgcttttatagtagccatgtctttctctaatactctaccaattctgaaactgttcatgggtcccttttatccctggagaaggcttttaccctttggactttagtttacctagttacctgtgaactcagctctttgatagacccaagaaaagttataattttatagattatctgactttgtttcattattaggaaagtagcaacattctcttgagaatttatgcattgtaagtgaaagaaaaatccaggaaatcttatagagaatggcaatatggttatagatgagaatgtggaaaagatgaattttgaaatacttcctatcatagtacaaattgctacaatgattttagaaaaaagtatatctatacacatacacggagatcatatatatggaaatacgtgtgtgtatttttcctgatgactctgcataataaacataaataaattcttaaagatggaaacaataaataaatgtcactttaaaatgacattcgattaaagtgacattttaaaaagacaatgtaaagctttttccaggccaaactatggtgattatcctatattaagattttaattcttcaaagaaagatagtaaaaagttcaatttctttcactagggaaagaaaattttctttcatcccacaacaaattagtaaagagagcaattatttctgccagaaataacaaagatcccattaaattgtcttagatagatcaattcctaaaacagattatttattcaggttcttaagctaaatattatagagtcattaaattgggtgttcaaggatgtatttattgaaattaagagtggtgtatgtgtaggtgttggtctgggtgcaatctggggacagaaactacatagtaattaaatgaagtaagtttaatatacagaactattgaatagtgacaggagaataactataaagatggactgagagctcaagagggcttcctagggctgagggagaatatccaaagaagaataaacatgaggagataaggtattgacaattggataagaagtggttgaaacccaccgaatggcaaagaagtctgaatggcaagctgtggacaccagtactagagtgcactccttttgcaacaggacggccaaaggaaacagagcttcgaggaaagggatgtagctatctggggctcccagatatactactgctacccaagtcaagagctagaggaaacacacagtgaatcctgcacactctaggtactttgcattggagaaaacaatttactcagtggggaaaaatacattctatagcaactcagcaaatgaactattctgatacctggatggcatcagatgcctgcagtgtctctactgtcctctctgctgaaacagcataacatcatgccagctggcaaaggaaagtacttaaaggattcagatccatttttatagagcaggctatgcagagtgaatttagggctgagagacagtaaattgataacaggcacagggcatcacaaataaatgatggaacagagtctgcaagtggggacggaaggagagcatgggagtaatacaatgctgacttgggaacactcagactctttgcactcatttggaacattggagtattaggctacgtttttttgttgtttgcaggatatttctttttcttaagaacttcatattaattttatcttctttctttttcattaaacaagacaagatgaggaagagaaagatcagtgtgtgtcaacaaacttgggccttattatgcaagaactttcttaaaaaatggagaatgaaaagagagtccttaatggtatgactcaatatccgtgttattctctatttatgataggaaaatacgtgttgcctgggagttatctatgccatgtgtatctcccccgacacatacaccaaaaacactaaaatacagcaacgtttatacaacagaaaacgctattcttcaggccatgaatctgtttgaagatatttcagttgacatgggctcataaattgaggtctgaaaccactgaatctggtagcaattgagaaatcaatacatgttttaaaagccaatggtcacatttgttactagtgtccccagtcatggagactagggttaagatactgacattccaaagatatggtaaacaaaccaacccaccacaatgggtaactggcattttctctttgagatctttttctcttcttgaaacaattagttttcttcaaaaaagtagaaaagttggaattgtattaaattccaagaagaaaattagcattagctcttataatcttaccatataaaaaatcttgattaaactttggtatattttaaaaatcagatcgatatagctaggtagcatttttaactaaattggaattccactatacatacatcgtaaagttttttcccctaagatcatgcattttggaaataaagtgatttcttattgggagttcgcatgtgatcaggatttataactaacgaagatactatccctccgatactatcttattattagaattatcagaatgcccttacaaactggtatactgttgagtttgaaattccagaatcttggcatgtaaccagtatatcattactaagctagcaatgccttggaactatctcttaaaacacattgactttcagcagactttaaacagtttataatatgggatatattgaagttagaaaagtaaaaaagaggcaaactttatgacaaaatgattgtggatgactaattttaaataagacttttctttatcttttttcctgtattatataggaatggctgaattcattgctcctactactttgtttgtatatatatcctcatagtcatcaagtaaatgatttttcttcactgcttaccatggacctgggacgggtagatacatttaatgaatccagattttctgttgtatacacacctgtcaccaacacgacccaacagataatgaataaagtagcctctactcccttcctggcaggtaagttttctagttacttaagaagaatgtctggtgtgaatatttggtttatttgaccgcagatttatacatttaatttgtatttcagtttgataattaaactttctggagtacatgaattgggaatgtgtcttccctttattggaagtaacatctcaccactcagtatctaagttaaaactacatgtattgcttgccaaacaagggtttaccatttggggtgcgcagtctctcaaaaagaaacttgttgatctggtataggatttgaggaagcatgaaattatacagactggtgcacatttagagcagtagtgtttagggatatgttgacatgtgactctgaaagcattgtcaccaaaatgaaatcgttgctgtagtgttttcttgttcttatagacaaagaaaaaccagtctcttcttttcctaaatttgattataggaattttaaccctaccttttaacaccaaaaacatgtgcttgctctatttgaatattcctttgagtattctgtatttcagattttcatccttcagcattaaggtacttaacgagttaaggttaagtagttgttaagttgagttaaggttaaggttaacttaacgagtaccttaaagctgaagggtaaagatcatttttataacaatcatttttacaacaatgctctgaaattagaggagatgcagcctggtacaaaggcaagagaactagacttagagtcagaggacatttgattaaaagtagttctaagagtccactcagaactgctgtgatacatatgtgtctggagtgcattttgaaagccatcagcttctcttagccttattattagcaaacgcaaaataagattaacaatttatgcaacaataaactcttacagtttgaagaaataagaccttgtgttcgatagatcagtagggtgactagttaacaatgatctataaaaaataatactatatttttcataaatatttcagttgagcgtaagaggcccaactcaatctgtcttaagaaaaagaatcttttgtctagcttaaaagagcagagtattaatgcaaggcagattagaggtttatcaccaacagaagtaaatctctgcccctccgatatacagctttgtgtgctggcttcattcacaggttggttctcccagaggcagagttggtctgcagactctccagatttaagccctcccagattagcaactccagtgaaaagattacagatcatttctgatagttcacaataacttcaaggattttatccacaggaacaaataggtgactttgggttagtgttgatcttggttcaccgagaactaatctctttggataggggatatgcggtattttcattgcccacttgttgagttcccaggtcatgaaccacattgaaaccacaggatatgtgagcagaggaagggaagtatcccaaatggatcatagtgtgtttttattagaagaactggatgtcaacagataaaaacaacatatgtcctttacaactataaatgcatacttcaaagggaaatctgtggtgatcgccctgtcattcattcataggctgggtcgagggctaaggtaaagattaaaattagtgctatagtgagtataagttttaagttgttcatttgagatgctcatggtaatggtaacaggaggatggtttctagatcagctagtaaaaatgtaatggctactaagaattttgtagagaatggcaaatggtgtgtcctgttggatcggacccacattcatatgggcatgatttttctgtataaatatttagttgttataaccagaataactacaaaaataatgctagcaatgtatttgtcaataaagttaataagaagttagttattctgttttggattataccaaacctaactgattgaaagccaactacgctaatactaaaagaagattctcattaacaaatggaggtagaagtacaggaacagtcagactatatctacaggatgtcagtatcaggcagcagcttcaaatcagaattgatggttggatgtaaagtgagatttaatttgatgagttgaataattttttatgagttgagttataattttaaagtgacttcgagtttgtacaactgtgtgagtattctaaaaaccatgaaattattaaaagggtgaatattatggtatgtgaattacatcccaatttttaaaggaatataaaaatttgacttagaaggtactgactattcattttaagcaacataactcccaccaagggcgttcttctaaggagaacctatgcatcttgctccaccaagtcactggaagcctgcataacctctttttttcctttctttgtcaacttccgtccaaattccactcaagcttaagtaattattaatcttatgcctggattctgaccccttcactggattctgtatccagtaatccagttcatgcacttgctatttggactgtctatggccagagtttccagagtatgttggacttttccttcctgtgagttatccaaaatatgctttccaacggcgcctcaccaagcatcacaccattagttccacatacattttaatgcctatattgtgcatcttacctaccaacactgaatccacttctgattcaagattataatgtgatatgaactatccacctaaggtccagtctcctaaacggccctgagacgtgtctgctcttgctgtttcacagacgtccataacaagacccaatgtcaggaacttgtgcttctcgacattacctcattcaaaaccacatgcaattataataataaatattcattaaatgctacaatatggtatatttctacaaaaactgtattctgtaaaaagagaatattttgtaatgatattattctatattctgtactctattaatattctataataataataataatggttattaagtttattttacaaatatagaaattgagtaacaaagggtaaggaatttgctcatgatgacataagtttgagaataaaattaattctatcaaaatacatacttcttgctccctctacattcatcttcaacacttccaccccaatccagaacttttcttgtattttgtctcatttttcagtattaataaaacatccatgtggcctcagacaaaatacctacagaaaagagggattctttcagtgatgtcaacatagtttcttaacatgtttttaaatttatcaccttttttagcttattaaccataccatcaggattattaaagaaaaataaatttgtataggtatgtccacctgatacaaaacagtgcctaattgcaatttaaatatctatctctctatatttaccatttcaaatttataggaatgataactatttttgaacagtttaattggtatagtaggacattgtatgtgattgaaattggctcagtaatcacaacatatgaaaataaaataactaattttcatgtatttcttctgattgcatctagatggaactttagaaatttctctcccacccaacattttagtctaactttctaaaagttaatacttgataatgttttatttccatagaaaactctagtaaaagcaattcaacatgacatcctgaagttgtgtctcctagtaatttactaacaataatattccttcttgtaacaaaaggtaaagaggtcttgggactgccagatgaggaaagtattaaagaattcacagcaaattatcctgaagaaatagtaagagtcacctttactaatacatactcatatcatttgaagttcttgctaggacatggaatgccagcaaagaaggagcacaaggaccatacaggtaattttatggctctaaaatttcactactctctatttcaattatgtcataagtcatgtgtgggaatagaggttagtatgccaaattagagcatcactatctgtcataatgatgtatgcatgtccctcaacatttaaaaaaaaattcatttttgggcataagaacatatcgataagtggtcattatatatagttatctacatacatttacatagatatatatttatatatgtaaatgaaatatgtattcatatgtacacacatagatattatatggaatatatgattgttaaaagaaaacaaggtagtttatggataagatagaacaaatttcccttcaaataagctcagttgttcaaattatactacaaggctatagtaactaaaacagcatgatactggtataaaaatagacatgtacataaatagaacagaatagagaaaccagaatgaagccacatacctacaatcaaatgatatttgacaaagtcaacaaaaatatacactgggggaaaaatccttttcaataaattgtactgggaaaattgaatagccttatgcagaacaatagaactggacccatatctctcaccatatacaaaaattaactcaagatggattaaaacctaaacataggacctgaacctataaaaattcaggaagaaaaaactaggaataacctcttctggacattgggctaggaaaagaatttgtgacttagttctcaaaagcaaatacaacaaaaacaaaaatagaaaaacgagacttaattaaactaaaaaaaacttctgcaaagcaaaagaaacaatcaacagagtaaacagatgacctacagatggaaaaaaaaatcgcaaactatgcattcaacaaagaactcaaagaactcaacaagcaaaacaaataacccatttgcctatttttcagtgcagttatttgagttgtttgaattcttcttttttcacaagaagacatacaagcaaccaaccaacgtaaaaaaatgctccacatcactaattatcagaaaatgcaaattaaaaccaggagataaccattttaccctagtcggaatggctattagtaaaaagtctaaaaaaatcagatgtttgcaaagatgcgaagaaaagataacacttatacatcgttggtagaagtgtaaattagtacaacctttatggacaacagtatggagatttctcaaagaaataaaaacaaactaccatttgatccagcaacttcactactgggtatctacccagaggaaaaaaaatcattatatttaaaaagatacctgcactcatatgtttattgcagcactattcacaaaagcaaagatagagaattaacataagtgtccatcaacagagggctggataaagaagataatatatatatatatatatatatatatataggaatactactcagccataaattaaaatattgataaatttgactagacataaattttaagaacgtccctttatcaaaagaaccatagagatagtgaaaaataaaggcaaaaattgtgataaagtggccgggcgtggtggctcatgtctgtaatcctagcactttgggaggccaagccgggcagattgcctgagctcaagagttcgagatcagcctgggcaacatggtgaaaccccgtctctactgaaacacacacacacacacacacacacacacacaattagccaggcgtggcagcgtctgcctgtagtcccagctactcaggaggctgaggcaggagaattgcttgaacttgggaggcagagcttgcagtgagccgagattgcaccactgtactccactgaatgccagcctgagtgacagagtgagactccatctctaaaaaaaaaaaaaaaaaggtgataaagtgtttataacagaaaaatctaacaaaaaattaattccagaatatgtaaatatttactttgaataaataggaaaaagatcaaaaatagaaaaataacaaaaggacattaataggaatttcataaaacaacacagatcaagaataagcactaggagaggtgtttttcctcattagcaaccaggaaactgcgtgttgaaaccacatgttatatcacttcatgttcataagatttgcaaaaattagcaaatagaacaattcgaagtattgacaaggatatgtagcaaagagaacacctatccaactttacaaaatttgtaaattccacaaaaattgagaaattttatcttaaagttgaagtgcacataacttataactcatcatcatagaaatcttattagtgaaactctcatacctgtgttaaagatttgcagcctattctcctcttcttccagaggacatagaataattactttttgtagtcataataagatagctagacccaaggcatttaaatgcaggtataagttcttcatcttttctcacctgcttctgcaaactaaggagttgtgtataatacagacagtacaactcaaccctcctaccaaacacctctgctgaatttgtagcctgagtgagaaatacacgttcactgtgataaatcactgagatttaggggttattactgtaacatataagagactatcctgaccaatacagatatatttacaagaagacatatatacagatttttatagcagcagatttttttttctggtaatcacaaaaagaaaaaaggaactaaccaaattgttatcaacaggagaatggataaatatattgatttacattcctgcaatgggattccataaccataaaaaagaagaaaaaattaaatgaggcaatttatttacatttcaaaatcataatatggaacaaatgaacatagttcatagtaattattagtagagtttaattttttaaattacatatatagtttagagatatgtagtggcatatatatatacataacgttcaggaaagcagttagctagttagaaacttggtgctggggaagtgcacaagagattctaattgtatttgaaatgatgcatttattttgcaaatttgtagtgagtccatgcgtgtttattgtatttttatatcattcgtatatctgaaatatttcaagatgatttcatgtaatatgcatttaattcctatactcaattttaattcatcttattcaaggatatctctttaatatagtttactattaaatggactgacagctctttttgaataaatccttttcttcaaaagatattctgattggcatgatttaagcgtagtaagtaatcttacttgaacttccattggcctattatgcccgtgttatatccagtgttagaaaaagctttagtttagtgtctctcaatccatgttaggctctgtgaacttttgaaaaacattaaaatatgtagttttcacaatacaaatcagaaaagagaagagaccaacaaaattcttcatcagcagaaaagcacaggacacggtatgagaaagcttagagtgttataatttaatgtaaaacatttcctaagagtgctccacctcatgattctgcctgattcattttgagaatcattgttataatttatgttttcataagctttgagtcaaaataagaacatttggaatttggggtcattgtaaagtccactgtttgctataatcagtattaaaatcatatttcaataatatagatagtgatgtaatgatagttatgatttgttttttcacaaagctcattgttatgaaacaaatgaagatgtttactgtgaagtttcagtattttggaaggaaggttttgtggctcttcaagctgccattaatgctgctattatagaagtgagtacaaaatgttcaaagcaaactaatgtttaatgcaagttaatgatattagaggcatcaaaagtttcatggaagaaaatataagtggatagccttgttatttcctttgctcactctgaagtttactgaagttactatataccacggaatgtagatacaaacagaagaaaaagtatctcattcatggactcaactttgttgggaagccaggaatataagaaaattattagaacagaagtagactattacagaactataaatcaggtcctcataagtaaatgagtaaaaacctctcagccttagaatgccatggaagaatgcctaattgaaataacattccagcttgaagcttgagatgaggggtggcttactgaatatataaattgagaaaagccatgccaagcaaatcataaagtaatgttaggcagggaggtaatgaaacacacagtaaattctgagagtggtgagtaactcaaaatgcctggactccgaggtcccagcaggtcaatgacaggacatagaagtggaaatttaggttagtatcaaatcccaataggccaatcatacatccacaagaaaatagatggttaaaagaaaactgcatgctgttcattaacgtacaaattttgcttattaatgcctttcttcagatcacaacaaatcactcagtgatggaggagctgatgtcagttactggaaaaaatatgaagatgcattccttcattggtcaatcaggagttataactgatttgtaccttttttcctgcattatttcattttcctcattcatttactatgcatctgttaatgtcacaagagagaggaaaaggatgaaggccttgatgacaatgatgggtcttcgggattcagcgttctggtgagtcaaacgcagcacaaataaataaacggaggaactcaggaaaactgggaatcttcaatgcatctttttttttttgaaatggagtctcgctctgtcgcccaggctggagtgcagtggcgtgatctcagctcactgcaagctccgcctcacaggttcacgccattctcctgcctcggcctcccaagtagctgggactgcaggtgccgaccaccatgcctggataattttttgtattttctgtagagacggggtttcaccgtgttagccaggatggtctcgatctcctgacctcgtgatccacccacctcggcctcccaaagtgctgggattacaggcgcgagccaccacgcccggcctcttcaatgcgtctttattaaaacctgtttctccacaaccaaggggtacaaatgagagatacctacacagaataatttcagatcatgaacaaatttccacttagttaatttcagtggggagaaatgctctgcagtgatggacaaaaaaaaaaaaaaaaaaaaaaaaaggaaatgtattttgcttctggaaattttacaggactaagtagagaggctggtcatttaatatatttaacaatctctgacccaattttatctaaatctatttcagattcactgtactgtgaaggaactgctataggaaataagataaaaggggacagaatgtgctaacatttaagaaaatacaacttccattacgaataatattgacttttttagaaaggaggaagataatcttttaaagaaacataaaaagtaaataaaaaaactttgagaaaacaaataaggagccaaatgcagaattttacagaaaaaataatgtcacaactatcacacatcaatgtccatttaaaaaaatgtgttgccatgaataagaaaatgccacttttaaacattctttagtaacaaggaaagaaatataaaaatcctttatccccatgaatggtataaactgtcattggtgtaatgtttgccaggctgaggctgcgtcttactgtgcttctctgagttaaggaagaagattggggttaggttattggttgattgtgaagaaggtgtaatgaggaatggccatggcaagagaggcgtaaacaagatagacaatggtgtctgtgccagacagaggtgagatgtgagctaggaggggattgaaagggaaaaagaagccgaggaccaggaactcctttgagactgaggaacatgcttggtgtgcctgagggaatgagctggcaaaacaggatggtgaataggggctgggtagtgtgggtttaaaatgtcagaggttgggtgattccaagaatggacaaggttctgtgtgagaacttatgaataattgactgaaagagcatggaggtgatgtttacagggagtaggacattaaataacagagaggctagggaggcagatgggctgtgcatagggcaacaaattaggagtctggaagagttccttccagtattaacatcttatacatcaatattgacctcttgtttgaattaatactggagggaaacgtagcagagcagtgaaatctaaagactatagagccaaaacccctgaacttgaaacatagttacataacacccttgttcattaggttctctatcaataagatgaggaaaataatggtattctgaatagggctattgggagaataaaatgctttaatgtttgctaagttttcttcaatgcatattaattgctatgtgtgtgagttattattgtgttggctttgcagctgttttgtttttgttttttaaaattattatttcattatagttttcaaagaatattgtaaaacaaaagaaaagaaattgatgaggaaaggaaagtgaattattctgacataaaagaatgggattcaaaaaaaatctttcttaacaaaaacaatgaacggaactaaaggcaagtatgtagacttttcagtgaacacatccagagaaagatgacaacagcttttggggaaggagtgacatgaccaaattacacataaggaagaatttcttgtctctgaggaagcttgtgatggtcctgaacttggagagactccagagaggagagaagggtctgaggttcactgaggggctaccctgtattaagacagtgccctacatagccatcatcttatttagtcttcagtggtagtattattcctggtgtccagagaaataaaggaataatagaggggttacagaggttgcccaaggttacagagcaagaatgcagcaaataaaatgttcgatccaaaatctattacactggaaacctaattccccccccaccgcccccaccccccagaacaatgtgcatgtgtgtgtgaatgtatttctgaaatcaattttaggaaaaacaattcctaattcccaaagaatattcctaattctaaagaattctgcccaaaacttttaccttgtatttatatatcttagaacacccaataaataaatgttgaaagagagaatgaatggatgaataagtgaatgaagagttatcttagaatccatttcaggtcttccttttcaagtgaacataaaatactaaaataacattttgtttccacattaggctctcctggggtttgctctatgctggtttcatcttcattatggcccttttcttggcacttgttataagatctacccagtttatcattttgtctggcttcatggtagtcttcagcctctttctcctgtatggattatctttggtgagttagtgaattaaatatctttccatccacctatagcctaaaaattgtttgtttccgactgattactctgtatgcctccttttttttctacctactctgtttgcatgtgaaaaatctataaacaggtacaatttgatttgaggtgttttgtaatgtcaatttttagtgcaatttgcagagcatagttttgtatgttatatacaaaataactataatatacaactgttacatacacaaaataactataattttgtatatctattttattatgctagtaataatgttagagaaacataaaccaactagatcttctctcattttaggtagctttggctttcttaatgagcatcttggtaaagaaatctttcctcaccggcctggtcgtgttcctcctcactgtcttttgggggtgtctggggttcacatcactgtacagacaccttcctgcatccttggagtggattttaagcttgcttagtccctttgccttcatgcttggaatggcccaggtgagatgccatctgaatgtctattaatggcatttctgaaacatctgtccctctggaatccataggctgtaatcatttacaaactcagcattgtaaggcttaaaattctagcgaaggctgttgtaaagttgcaaagacagaacttttaaaagcttggaaattatttagcccagcaaaataagacatttggaaagtgaaaaaaagaggatcaacatacaattatttaaaggcaatataaagtattttcttaggctattaattaaatatggacatgtggcaaatctaattataaataactattccagttcatgtttttacctagtaattgaagagaatacgtgattaaaaaccattaaatcaaattaaattaaaaatttaaaacatctggaaaattcattagtaaattatgtttctattcataaaatgtcttttctgtttatgtgattcttattgaattccccttgccttccctctaactaaatggaaatgtcaaccattaaatatccattatttagtgtttaacaaaaggattgttaattataaagagctcattaacttgaacatcatagacaagcccacttctggttctacttaaacacagcagtgccttttgcccagaaattctccctcatgccgccaatttacatggatcaccacaccttttgactgtgtcctatttggtaaaagttcatctaagttcgatctcaaatgtcatctcttcccatacttccctacttcctcctaatgtttcaatttcatttggaacatatttttatcatagcaattactaaattgcattctagttgctcatatgtccatgccttccaaggcatagatttgagaaccataaaggaggcagtctccctatataactctattctcagtatgaggcaataagtagtcatttcattactatgctaaacctaactgtttaaaatgtatcttatacctaatttcccttaattaattactttttaattttcagcttttacacttggactatgatttgaattctaatgcatttcctcatccatcggacggctcaaatctcattgtagcaacaaatttcatgttggcatttgacacttgcctctatctggcattggcgatttactttgaaaaaattttgccaagtgagtaatgatatgattaaaatcatatatcatttaaatagttttatttctgaaaacaaatctcctaatggatatactatttatattttaagaactattttgtgtatcaacagcaaagagaggaacaaagtcgtcgctactggccaaattatttcttcatttctttctcactacttgacttgtcagaactaaagcctgaattttgtttatagaatcactaaccttcatttgaacttcactttaagtatatggtatttttttttttagacctcttagaaagctagttcctaaacagttctggtaatcatggtcatttatagctgcttatgtctaactgtttagctcgatggttctgagctccggctggacaacagaatcatgtgaagaattttaaagcaagtctaagcccagctcaacctgaagagattctgatttaattaatcaatgcatctacgtttaaaaaaaaatctccccagaagttcacaataggaaagccaatatatcataaattttcatttgtatcaccttgcaacatacaagaatatgagttacacaaaagcagggattcgttttgttcacagatgagatttaagcacccactgcagtgtctcatgcaccctagatacttgtgtgcttcactttctttttttttctttttgagacagactctcactctgtcatccaggctggagtgcagtggcacaatctcggctcactgaaacctctgcctctccagctcaggcaattctcctgcctcagcctcccaagtagctgggattacagatgtgtgccacacgcctggctaatttttctgtttttagtagagacgatggggtttcaccatgttgatcaggctggtctcgaactcctgatctcaggtaatccacccgcctcggcctcccaaagtgctgggattacaggcatgagccacagtgcccggcttgcttcacttttttctccctccttttataaccaaaggcaggccctgattctcccttctgcgtttcctattcaagacagaatgccaagggccctttattcaaaaagcaatgaatacacacttttggaaagggaagaaggggaaagggtgagcaggaagacagccacatcttgaggcaggaaattcatcctgttttgtttttgtttttgttgtttttaagacaatcctttaagaattactgtctcttccttttaaaagaacccagaacaaaagatgtcaggatccactattgttggctagcacacttattacacaattagaattgtttgaatatggtatgttttcatttgattttttccagtagaggtaaaaattacataactgattagaaaaattacttttttgcctactaatattttaaggctttctaccccttgttaacattgcttatttaagacacatacttaaatatattttctctgttctacttttgtttttatggcaaaatctcactgacttttttttgtgtttctatcatactgtatatccctggcatgctgtgtatagttcaggaaatttactcgtgtgacccttgtgcttactaattcttccttttctccttctacttattaaaacatcctggttgtattatttttcatttttgtttatttttccaatgtgtttattctcagtggatccacaaacagatgtcactgtgtttacaattgcttattagtatcctcttaggtaattgttttctctaaccaatttaaattttattttggtgtgcactatgtgatatattccatctttttttagtccttgtttcaaacatactctaatgatattactttaaatattctctttgtacatgttttatcaagttatatcacatattgttacattttcatggctgcattttattttttacttaacattatgtcacaaaaatatctttcacatccatgctttttccagtttcaaaagcatagtattttattattataactagaaaatttatttcatccaaataagtgagttgctccattttcttcctaattgtctctgctcactaagcttgaacttaagaccagaggtgactttgttcaaaacacttctaaagataataaataagaatgacagaaaaattaactggataaaatgacagcattatttcatggtaaatctggtggcagaaggtatccagttatggtggcatgcttttatttgctagatttttcttttgtcaaaagggagagataggtgctaacaacataccatgtggcaggtatacagagagtgtaagacatttattgcatgaatgaaggactgaacatgtgagaaatacacagaagtttgaaaacccataaccttacagtggggatagttgcagaatattagtgaagtacgattcttccgtttcataatgtttcctaatatgaagaaaaacagaagtgatcatagaatactaatacagctggattcatttccagcaagatgtttatgagtaatatgtctttaaagcagatcataaatttgcttaagaggaaaattatggtttgggaatgaaataaagcagaaatacaaaatagctttaaaagtattcattttgtgttaagtttcaattaattattttatcgtgttctttttctttcttacaaatgtgtcatttacttttcttaaatcctattctatcttcttttggattttttttaaaggtatccaatagtcattctcaatttcttctttctttgcctatgtaatgacacctggtcttctagacagaattcagcatgcctgcatatcttacattagcaattcaatctgtctttcttgaggttaagaaattctaaaacatttatttaaattccttttgaaatatttaaaaatcacagtttcattgcttccgataggatttattatagtagagacatctggtatttttttttccttatgaagctacatgtgtcaaaacgtgcattacctgctgttgaccacatgttcaggtttagcaacaaagggctgtgttgccgtgctacattactgtgactctctctccctaacgtggtcattgacccaatatttaattgtcttctggccatgtagatgaatatggacatcgacgtccacctttgtttttcctgaagtcctcattttggtctcaaacacaaaagactgatcacgtggcccttgaagatgaaatggatgccgatccttcatttcatgactcttttgaacaagcgcctccagaattccaagggaaagaagccatcaggtaataaggctgcaggtggagaacagggcaaaaaggcaggaagctaagagatagcacctgaggcaagcagtgttcccttttgtgctctgtagacagttcccacctgtcctcacctatgctgcttctgtcactttccatctcaagttcaaagaaagatccctttaccaaccccttacagcctaacattgtcgacatttacactaaataaaagcttaaattttaccagctaagataattcaacaaaacccttgcccggattcagtcttttacttgtttctcttcaccctcattgctttctgggtctcagttattcactctttgtccccacctcatctatctcccttttttttttttttgacggaattttgctcttgttgcccaggctggagtgcaatggtgcaatctcagctcactgcaacttccacctcccaggttcaagcgattctcctgcctcagcctcccaagtagttggaattacaggcacccaccaccaagcccagctaattttgtgttttgaatagagacggggtttctccatgttggtcaggctggtctttaacacccaacttcacttggcctcacaaagtgctgggattacaggcatgagccaccgcgcctggccttttctctccactttttaaacttcttatttttcttctattttttgtcctttaaaagaagatgaaagagtaagaaagaaggacaaagaaaaggcctagaggtagatacaaagggaattcagggagaggtgccctgcagagttaagcctatctcattctgtgtgacaacaaaatgtccattttgtttggtgctggtgacttttatttctagatatgagaaaataggaagaaagtccttaagatccttggctgtccaagtcatactcatcatcaatgaccagcctgtgtcagtcccctgtgaaatgtctcagattatcccaggttgctgaacttctaaggagcccatttcattttgttcttttaacctgttccatatttatcttccatatttttatttgtcccacaactaagctaggtttactctagcagagcagctcagagcaaaacagtggctttatttgaggtgcttgtgtgtttctttttgttcctctttgatcgctttaacaccttgcccaattataagtgctgtggaatgagagtaaaatggaatttaaaataagaatatttaacgagacagttttggccaggagcggtggctcacacctgcaatcccaacactttaggaggctgaggctagtggatcacttcagctcaggagtttgagaccagcttgagcaacatggcaaaaccccatctctactaaaaatacaaaaattagccaagcatggtgctacacgtcagtaatcccagctacttgggtgactgaggcacaagaatcgcttggactcaggaggcagaggttgcagtgagccaatattgtgccactgcactccagcctgggtgatagagcaagactctctctcaaaaaaaaaaataataataataataatatctaattaaatagctttatatgaatagagactgaatattttatgaatagtagatgataaaataagaaacataaatttgatttggcctatggattatatacttacctggtagaataaaaccatgcagatttatcgcctagaattccagacctataatagtactaagcataagttaatttcattcctttctgtagccatcatcaccatgtaaccaatatcatcttatatgcactgtacatgcgagatgaaatattttacttgccttccaacacagccctaaagccctgcaaaaattttcaggttgtgaaacctgaagctgatctggaataagtacgttggttaaggtaacagagcactaagtggttgtaatgggataagcttagatgggcagtactgtgaaccccatgctcttgctattatgatacattgattgtctttcttactgtagttcttaatgaaccttgggagaccttgaatcaggatggccaaagatctttccaacctgtgccagtggttcacaggagcctttgggtatcgaatgtccatgtcatctcttggccttgctttcttagctttgcagttcagaggtgatcccgttctcaatactaatattagcttataccccaatctatggaacctttgcttatgggtcccaatcacagtgaaattcttataactcctcacatgtaactcctcacatgacgccaatgtgcagacagggttggcaagcggtattctagctgattctgtcacacagctatgactgtgtgagagtgaagacccagatcttcatgtatcctgaagttaagatttatccaatcctgtctaccaaactggaaattacaaactgaagaaaattgtcactttgaagtatcttttctttttttcagaatcagaaatgttacaaaagaatataaaggaaagcctgataaaatagaagccttgaaaggtaaaaaaaaaaaaaaaaaaaaaaaaaaaaaaaaaaaaaaaaaaaaagagagagagaaagaaaatatttgttatattagtattgatttcctgattttaattcagttttgctttcggtgattaattagtggtggtattttagacttgaaaagagttatttgagctgcataagacttttttttctaatgtattgcttctactttataaaagttagaaaaaaatgaatatgttttagaaatagatgtatttagaatctatactgggtaatattgaggtagtctaaggatattctgggtttttttttctacaaactcaagttttttgtctgtaatccaaaagctattggtagatactgtatgtttttcttttgtgtgaaaatgtcacttacctcaaaggagttttagccatgtaataacttactattaatctattcttccatttaataaatactaacattgacctaccatatgcaggcaatgtcaatcaacctattatatagatatgtttcattcatttaaactaagtaatttcaaaatttcaaaagaagctattttgagaaataagtttatagagggaacttttaatgttttattttgaatttaacaacccactatatttatatatagaaaagacaaccattcaagagaattaataacaattcattggctccataatggaatattttttgtggttttaattgttttccatccctttatcttatctttctttcctttctttttttcttcctagatctggtatttgacatttacgaaggccaaatcactgcaatacttggtcacagtggagctggaaagtcaacactgctaaacattcttagtgggttgtctgttcccaccaaaggtacaaactagtttgttttctttttttttaaattatactttaagttttagggtacatgtgcacaacgtgcaggttagttacatatgtatacatgtgccatgttggtgtgctgcacccattaacgcgtcatttaacattagatatatctcctaatgctatccctccccactccccccaccccacaacaggccctggtgtgtgatgttccccttcctgtgtccaagtgttctcattgttcaattcccacctatgagtgagaacatgcggcgtttggttttttgtccttgcaatagtttgctgaaaatgatggtttccagcttcatccatgtccctacaaaggacacgaactcatcattttttatggctgcatagtattccatggtgtatatgtgccacattttcttaatccagtctatcattgagggacatttggcttggttccaagtctttgctactgtgaatagtgccacaataaacatacgtgtgcatgtgtctttatagcagcatgatttatagtcctttgggtatatacccagtaatgggatggctgggtcaaatggtatttctagttctagatccctgaggaatcgccacactgacttccacaatggttgaactcgtttacagtcccaccaacagtgtaaaagtgttcctatttctccacatcctctccagcacctgtggtaaaaactagtttattttcaaagtcaattgacaaataaatcagctgttaatatgaaattctttcaagtgttaatcacaaacacacatacctagggaaaaatggaattttatttaatagtaatattctgtggaagtatgtaatatttaattggtatactgcatatggaatctgagtatttcataataactattttcatgctcattagttgctatttggcattccagcttctatctgtcaactctttttttttttgttaagcaataaggtatttatttttttattttttaaaatttttattttaggtttgggggtgcatgtaaagctttgttacatagataaacacgtcatgggggtttgttgcctatattattacatgacccaggtattaagcccagtacccaatagttatcttttctgctcctctccctcctgcaaccctcccccatcaagtagaccccagtgtctgtgatttgcctttttgtgttcataagttcttatcatttagctccctcttataagtgagaacatatggtatttcattttctgttcctgcattagtttactaaagatgatagcctctagctccacccatgttcccacaaaagatatgatctcattcttttttatagctgcataatattccacggagtgtatgtacccccattttctttatctagtctgtctttgataggcatttaaattgatttcatgtcttattgctcctcatgattctgtgggttgactgggcagtttttctattctggaccaaagtgacaggggctggatgatttaacatggcctcactcacatatctggggcttcagttaggacagctgcgtgtcttttcccacatggaaatatatctttcagaaggcctgctgggattcttcacccaatgatccccatgatcccagcagcaagcaaagacaaatcactaggtggaagctcttcatcagactctgcttgtatcacatttgctaggatactacagggtatataggcaaagctaaatgtgaggggcagacaaagggactacaccttgatgggaaaagctgcagatgagaacatattttgaatatactatgcaactaaagtagaagtttctaatgcctgaattgtataaactgtcaagataaagtcatacgtacatttaattaacagcgattttattaagaaatatcttaagccttatcttgatattaacttttcctttgttacaggttcagtcaccatctataacaataagctttcagaaatggctgacctagaaaatctcagcaagctgaccggagtttgtccacaatccaatgtgcaatttgacttcctcactgtaagagaaaacctcagactctttgctaaaataaaagggattctgccacaagaagtggataaagaggtacaaaaatatgttaaagttaatgtgttggtcaaaatgagattattaaaaccatttgcactgagttttaattttaaattatttgtgcgcaaatcattgtacaattgttggacaagaaaatccaatttaaacaatagctaacattgcatataatttacaatgcgccaagcatatccttaactttaaatctaataaatcatttattcctcatagcaaccctatgagataggtgctattattatccctattttatacatgtggttcaagagagcaaggaacttgaccaacttagtagtcaatgtgtgtgacattcaaacccggaaagtttggctccagtgtttgttctttttttttttttttttttttttttgagacagagttttgctcttgtcgcccaggccggagtgcaatggccctatgccggctcactgtaacatttgcctcccaggttcaagcgattctcctgcctcagcctcctgagtagctgggattacaggcacgccgccaggcttggctaatttttgtatttttagtagaaacaaggtttcgccatgttggccaggctggtctcgaactcctcacctcgttatctgcccgcctcagcctcccaaagtgctgagactatgggtatgagccaccgcgcctgacccagtgtttgtgcttttaaccatttacactttacagccttgtatttataaatttttaaaaaaggaataaattttggtgtatgacataaatactgtcttttggttagatacaaagggttctgctggaattggaaatgaaaaatattcaggatgttcttgctcaaaacttaagtggtggacagaaaagaaagctaacctttgggattgccattttaggagatcctcaggtgagtcacattgaatttgcaggtgaattcaaagtttaaaaaatggaacttttggtaatagttcaaatattttattcgcaaaggacatgtgttataaaatattcataatagaacattaaatagagtatctaaatcctaaccgtaatactctgttaaatataatcaatatggtttttgcgttgttttctggaagaacttcacctttgaggaaaaccgccttatatactttcctcgtttatagattttcctgttggatgaaccaactgctggattggatcccttttcaagacaccaagtatggaaccttctgaaagaacgcaaaacagaccgcgtgatcctcttcagtacccagttcatggatgaggccgacatcctggcgggtaatcactggtttctgttaagtatcctgaggaggactttaagagatctaaaaatatggattggtctctgaacagttatattttgtaattcggtaatctagctgtatctggtaaattgaatggctggtggtaatttgaactggacgcaaagcctcttgcaaccatttcagtgtatcttgcagaattttgtataatttggtcacatagaagcatgatctgccaggaaactcgcttattgcaaaataagtgaagttgagtttctaagagatcaatccttttactcagaattgagggaaatccacttgaaatattcaaatgattttaatgtttcatctgttaaaatatataatgggataattttctatattagaacatatatccacaaaatttaacctccctgatgggatggattgcaaaattcacgtaaacgagattaaaatgtgtctatttcattgagtccttatcgagtcctgcatttaaaaccttagaagctcctgaattaaagtttgattatatagatgattacctgtcttttcttggaaatggatgggccactttttaacaaactttcttctttgctcttcttctttttcagacaggaaagtatttctctcccaagggaagctaaagtgcgcgggctcttctttgtttctaaagaagaaatgggggattggatatcacttaaggtaaggtcacttaagaaggctgggagtagatctagtgtaaggcttgatgcttgaagcaaaacattacaacacacaagaagaatttgtattattgttattttttgttttgttttgtttttgagacggagtatcgatcatctcggctcactgcaagctccgcctcctgggttcactccattctcctgcctcagcctcccgagtagctgggactacatgggcccgccaccacgcccagctaagtttttttgtgtttttggtagagtcggggtttcaccgtgttggccaggatggtctcgatctcctgacctcgtgatccgcccgcctcggcctcccaaagtgctgggattataggcgtgagccaccgcgcccggccaagaatttgtattattatacacaggtgtttgtacaaacatgtacacgtatttgtgtctacctagttagtatgtatatgtaagagatattgatctggagattttagatattgagaatataacaacaaaagtttagataaatatgactaaaaaatatatatctgcaacacaggttttattaatggaggtatgtattaagggaatcttttcaactgacacacttgtattttacaccttcatcatctctcatcttcccagggtgttaatatattcttaagtcggctacttgcttccactccttctagatcttccccttctttcttgttcttctcctcccatccatcctcttcattttattatctttattttgaatagcagcatattctaactgtaatttactgagtgactcagataagatatttaacattattttacttaaaccttctatcttttaacttttaattttaaagggtatatagtaggtgtatagatttatgggggtacatgagatattttgatacaggcatacggtacataataacatcggataaatggggtattcatcacctcaagcattaatcatttctttgtgttacaaacattccagttatatactattttagctgttttaatatatgttgactatagtcaacaatatattgcaatattaatatagtctgtatagtcatattaatatattgtacatgtaataaaatctgtgaagaacgtcacagtaatataatataattatattcacatgtaatataatctgtgaagaatgtgctatcaaatactagatctcattctactaacagtattattgtacccattaaccatccccccttccccaccaccccactacccttctcagcctctggtaaccatccttctactatctccataaaatcaattgttttaattttcaactctcacaaacgaatgaaaacgtatgaagtttgtctttctgtgcctagcttatttcacttaatataatgatctccattccatccatgttgttgcacatgacagtatctcattctttttatggctgaatagtactccattgtgtgtatgtaccacattttctttacccaatcatctgttgatggacacttaggttgcttccaaatctcggctctcgtgaatggtgcatcaataaacacgagagtgcagatatttccttgacatattgatttcctttctttggggtatatacctagtagtgggattgctggatcatatggtagctctatttttagatttttgtggaacttgaaaacgttgtctatagtggctgtactaatttacattcccaccaacagagtacgatgattcccttttctccacatccttgccagcatttgttattgcctgtcttttggataaaagccattctaactggggtgagatgatgtctcattgtagttttgatttgcatttctctggtgatcaatgatattgagccctttttcatatgcctgtttgtcatttgtatgtcttcttttgggaactatctattcagatattttgcccattttgaattggattattagattttttcctattaagttgtttgagctctttatatagtctgattattaatcacttgttagatggatagtttgcaaatattttctcctactctatgagttgtctctttacttgattgtttgctttgttgtgcagaagctttttaatttgatgtaatttcatttgtccattttagctttagtcacctctgcttgtggggtagagaaatctttacccagaccaataccctgggaagtttccccaatgttttcttgtagtagtttcctaggttgaggacttataagtaagtctttaatccatttggatttgatatttgtaaacagtgacagataggagtctaggttcattcttctgcatatggatatccagttttcttagcactgtttattgaagagactttccccaatgtatattcctggtcctttgttgaaaatgagtttactgtagatgtatggatttatttctgcattctctattctgttccactggtctatgtgtctggttttatgccagtaccatgctgttttggttattacaactctagtataatttgaagtccgatgatgtgattccttcagttttgttctttttgctaagaatggctttgtctactctgggccttttgtggttccatataaatattagtttgtttgttttttattctgtgaagaatgtcattggtattttgatagcgattgtgttgaataagtagattgctttgggtagtatgaacattttaacaatattgattcttccaacccatgagcatagaatatctttcctttttgtgtcctcttcaatttcttacatcaatgttttatggttttcactatagagatcttttacttctttggttaagtttatcactaggtatcttattttatttgtagctattgtcaatgggattactttcttgatttctttttcagcttgcttgctgttagcatgtagaaatgctattgatttttgtatattgattttgtaacctgcaactttactgactttgtttatcagttctaatagcattttggtgtagtttttaggatttttcaaatataagatcatatcatttgcccacaaggatgattttatttcttcctttccattttggatgccatttttttctgcctcttatctgattgccacagctaggacttccagtactatgttgaataacaatggtgaaagtgggcatcattgttgtgttccagatcttagaaaaaaggctttcccccattgagtatgatactatctgtaggtttgccatatatggcttttattttgttgagacatgttccttctacacctagatttttgagggttttatcatgaagagatgttgaattttatcaattgctttttcagcatcagttgaagtgatcatatcttttttgccctttattctgttggtatgatgtatcacattgatttccatgcattgaaccatccttgaatctctgggataaatccaaccatgaccaagatgaatgattttttaatgtgttgttgaattcggtttgctagtattttgatgaggattttcacatcaatattccagtcatatctggcctcatagaatgagtttcaaagtatcctctcctcctctatttttcagaataattttgaataggattggtattagttattctttaagtatttggtagaattcagcagtgaattctctgctgaaagactttttattatggctttaatcttgttggttgttattggtatgttcaggttttggatttcttcacggttcaatcttggtagattgtacgtgtctaggaatttgtccatttcttctaggttttctaatttattgacatacagttgctcatagtagccactaaatatcatttgaatttctgcagtatcagttgttatttctcctatttatctctgattttatttatttttgtctttctcttttttttcttttttttagtctggctaaaagtttgtccattttgtttaacttttcaaatttttcaactttttgtattgtttatttcatttcaattttatttatttctgctctgatgtttattatttcttttattctacgacttttggttttggtttgctcttgcttctctagtttttaagaagtgtcgttaggttgtttgtttgaagtttttctctttttgatgtaagcacttattgctataaattctccatttagtaatgcttccaccgtattccataggttttggcatgttgtgtttccattttcatttgtttcaataaatttttcaatttccttcttaatttcttccttgacacactggtcattctaacacatattatttaatttccatgtgtttgtatagtttccaaagttcctcttgtattgatttctagttttattctattgtggtcagagaagctatttggtataatttcaatttgaaaaaaaaatttaagtcttgttttgtggctagcatatcgtgtatccttgagaatgatccatgtgctgaggagacgactgtgtattctgcagccattgcataaaatgttctataaatatttattgggtccatttgatctatagtgcacattaagtccaatgtttttgattttctgtctggatcatctgtccagtgctgaaagtagtgtgttgaagtctccagctattattattgtattgggtctctctctctctctctgtctttagccttaataacatttgcattacatatctgggtgctccagtgttgggtgcatatatatttacaattgttatatcttcttgctgaattgacccttttatcattatatagtgacattctttttctctttctatggtttttgtcttggaattcattttgtctaatataaagatatctatttctgctcttttctgttttctatttgcatggaatgttctctgttattatcccttgaataaactttctatctttatctctttctttatctcctccttaaggccaatgactcttatacttgtcctttggaggctcttttttagatcttgtaggcatgcttcattctttttcaattcttttgtgttttgtctcttctgagtattttcaaatagcctgtcttcaagctcattgattcttctgcttgagagactttgatacattcttcagtatgtcagttgatattttagctccagaatttccgcttgatttttaaacattatttcaatctctttgttaaatttatctgataagattctgagtcccttctctgtgttatcttaaatttatttgaacttcctcaaaacaactattttgaattatctgtctgaaaagtcacatatctttgtcactctggtattggtccctggtaccttatttagtcatttggtgaggtcatgtttttttggatagtcttgatgcttgtggatgttcatcagtgtctgggcattgaggagttaggtatttaatgtagtcttcacagtctgggcttgtttgtacccatccttcttgggaaggctttccaagtattcaaagggaatagaatgttatggtctaagtctttggtcactgcagctgtatcagcactagggggcaccctcaaatccagtaacatggtgattcttgcagactcttcgacgtaccactttggtgctcttggagaatactttggattaccaggcagagatgcttgttcccttcccttatctttctccaaatggagtgtgtgtgtgtgtgtgtgtgtgtgtgtgtgtgtgtattgagctgtctggagctggcagaggggtgacacaagcacccctgtggccaccaccactaggattatgctgggtcagatctaaagccaatacagcactgggtctttcccaagacccgcagcgaccactgcctggctaccgccaatgttcactctaagcccaagggctcttcaggcagcaggtggcaaatacagccaggcctgtgtccttccctttatggtggcaagcttcccactggcccagggtgggtccagaaatgccttctgggaggaaggacctggagtcagaaatcttaggaatctacatggcactgtattctgctgcagctgagctgacacccaaaccagaagacaaagtcttcccactcttccctctcctcaaggagaaggagtctctccccctagtcaccactgccccaggcctgcagcgagtactgcctggctaccactgatgttcactcaaggcccaagggacttcaggcagcttgtagtacatgctgccaggcctgggtagcagctcccttcagggcaatgggctcccctctggcctggggcaagtccagatccaggagccaaggcctagaatccaggaccccaggagtccgcttggtgctctctactccactgtagctaagctggtacctaagctgcaagacaaagtcccctttactcttccctctcttttcctcaggcagaaagtctctccccacagccatcacagctgggaatgtgctaggtcaaacctgaagccagcagagcactgggcctcacccaaggcctgtggcaagtactgcctggctactcctggtgtttattcaaggcccaaaagttctttagtcaggaggtgatgaattctgccagaactgggtctttttcttcaaggcagcaggtgcccttctggcctagggtatgtctaaaaatgtcatctgggagcaagggcctggaatggggtcctcagaactctgcctggtgtcctattctgctgtggctgagcttgtatgcaagttggaaaacaaaatcctatttactcctctctcctctcctcaacagaaggagggagtctctcctggaacagcgagctgcactgtctggtgttgggggagggggtgaaacaggcactcccttggctgctccagctggtgtctctcgaggtcttttgcaccccaagtccattggctttgagcccagaacagcatcaggacttgcccaggaatttcagtccctgtggtcctacgtttatttagatccccagagcactttagtccatggtagtgggatgaatgcttcccctctggctaaggctggtctaaatgctccctctgtgggcagtggccgaattctgccctacgttgcttgtcactgtgacaggcaacactgagttccaatgcaaagtcccacaatgactgtcctctccctcccccaagcatacaacattctctctctgtgccacacagctgctgccaaggatgggaagttgtgtcagcaattcaagactgtctttcctatcctctccagtgcttctttccttatatgatgttaaaaccactatcattgctcacctgatttttttgttcttatgaaggtgcttccttgtgtggacagttgttcaatttggtgttcctgggggatgggaagatttctggagggttctatctggccaccttgctctacctcccctcctaaatcttctattgtttaaaatagaagtgttgttacttttattttacagatgaaattacagactccctagattaagaagtgctggaatcagaaattgaacctgaatatttttaaattctaaatctagtagtcaaatccatattttaaactactgtttttgttacatgattggtcgtttttgtaaatttataccatctatacttaagaaagaaaacaaacctatcatgacaacaatacaaagaaaataggatgacagtttccttaactcatctgcacttgtttaagtcctagaaagttatttgaaaaatatctcatgtagatatttttccagttctgtgtaatgtcccaatttttttttatttcttatagcactttgtttgcatctcttcttggaaattaattaaactatctgaaagtcagtgtttccacctacaaagtgagagtagcaattcctacttacaagtaaaggttatagaaaaataaataagagactgcctggcacactgcatggaaacataacatgttttcaaaataaaaagtgctagtcaggatccctgcccaatttgcgagtccattcatggactcctatttgtgcaattgccttattttcttctaatctaagggccaacaaattatagctcatgagccacatccagcctacttcctctttctgtaaatacagtttggttggagcccagtcatgccctttcttttacacactgctctggctgtctccatgttacaacagcagagtggaagagtttcaacagagttctaacagcctacaaagcctagaaaatttactatctagtacacattttacagaaaaagttttacaacctcccctttcaagcttcaagttcctcaaggaatgactttctgcatgactcattcattccgccccagcactcagcacaagttcctacaagtggccaaggaataattcttaaattgttttcatttcaggagtcagcatcatggaaaacagctacgacattttttgcttcactcttccagtggatttcactacttctaaaaaaatagcatatattcttttaagttcatacatgacttatgtgtcagtggaataatttttgacttatgcatttggtcaaataaaattgctaccatttttaagggcttgtcaagtgcaaacttcactattattccattgttcgaataaccctagaggctgggaatcattattccagttttctaataaagtaactgtttagataagttaaataacacgttccagatgctaaaacaatatttcaaagccaagtcactactgatattttgcccactgtataatttataacctcaattaatagaatattgtgtttgtctgtttctctataatggagaaatagctgtggtatttttcaatggatagactgattttctcaatgatactttgttcttattcaaagttctgggcttagcattacaagaaaagcaaaccacattcatccattattagtttctatctataatccagtttccttcatagcacttactactattgataattattttactcatctggttgtctacatgttttcttcctgacgcccgcactagacaatgaactccataagagcagaataatgctgctttagtcaccattgtatcctcaacactaagtatgatgtttgtcacatactaagaacttagtaaatttgcattggatgactacattgagtaactgaaactgtttggcatctatacttctcacaagtctcttgttcctttgaagcgatacaacaattctatttagtcagcttaaaactgaaccttcaactgcaacgttatccattttgcatagtcctgacctttgctgtactgcaaccctggtattttccactctgtgaccaccctctcttcaggagcttcaatcaatatgaaacttctctgggcactactcctgagtaacctcaccagtaactctcattagctcattcttttcttttgtccatcacatttatatgatttggctgggtttttgtcctcttatttcttgggtttttgtcctcttattttgtgtttgtctgacctatttctggcattagattttaattgattttctttgtcctatagagactagttaattattttcttgctattggagactatgtcgagtaacatatgtctttttttttttttctgaatgccagcttgcagttaaatgaaatatgtgttgaggaaaacataacatcacttgttaaacagcacatccctgatgccaaattatcagccaaaagcgaaggaaaacttatttatacattacccttagaaagaacaaataaatttccaggtaatgtgcatgaacactgtgaaataaaatatgtgaataatagtcatcatcatcataattattatcattacaactaacatttatcaatgtcttacagtatgctcaggtactgaaacataatcaaaagaatagtacaataactgaattattttctgtatagtgggaaatagaattacattctaatagttgtattgtaatgcctgggcattttagagggcttcttttagtccttcttccctagtagtgtgtaacataatattctagtattcataaatgtacacaaacccaaatggttgaaaacctctggcttatgcactacattaaacagccctgtgatgtggctatctgtctcggtgagacttttgcaataactttgggtttttcaggctaacgcataaaagtttactaactatgtttgttgttcagggaacttgttccttaacaatggggcactataagggcccacattagtggttgaaacaattaaccttgctgtatatgtggttaacaaagacatatacattcattcaaatacacattttatggtgacaacacaagcattccttagaatcatcaggaaagtgttacgcaaattctgattagtactttttaacagtaattataatttaaagaaaatttgtagacgttttaggtggaatgaagaatgatgcataatactcattattagcttaaatcttacttcttttctacctttctgtatgaggtattctagtcaagacaaaaagcttttaacctatccttttgcccaagcaggagctccagatggaagcctcaggacttctgtaatcaccctagtattagaattaggtttttatttaagcttgatttaaccactgtaattcaaatccatgcaggcaggggcactgttcactgcttcatgaacaatgacagatgcgtaagtatattttggtgaacgaactaaagaatgaatagatataaaattgctagagcgaataatcactgtcacaattccaggaaaattccctgattcagttccacattctctgcctgttaggtcttgtgaattttttcttccattgttagaaacagaaaattttttaatggtttatattctatgtcttctctttaacaaatattttctaaactacagaagattctacaccatccaattaattctcaaaaaattaattcctttccttttgtcagttagaacataaatggctcccatttatatctgttctctagaaaagacttttcaattaattaggcttagagttgaaaaacccagagtctcacaattaattaaattttaaaaggaagtcagaaaaaactaagattaaactttaatagaaatgcaaatgaatataaattaatgtttgacaaagtaatatttgggttgtaacacatgatgtaaaatagaaaataatatatagaatttgcagaataagatgatctattatgaaatgttaattttcaaatgtttttgacatatcacaagtatagtttcatagatttgtgcttattagtttgaaaaattgtcttcagttcacttgtgattcttgttttaattcactgctgtatatgtattctttagaactttacaaggatcttgatagctatcctgacctaggaattgagaattatggtgtttccatgacaactttgaatgaagtattcctgaagctagaaggaaaatctacaattaatgaatcgggtaaataaaatgcatgaaaattattatgtaaaagcacatatttcaagaacacactgttccaaagatgtgattacaaaatgtggggttcatgattaaggctcttcttagacaagcttgtgtaaaaatgaaacgcatccctgtcaacattgctttgtagttaaaaataatccatttttctacatccaaggctcactgcactcatattagctctaggcttctaagggcaatttcagataaaacatttattctaaatcataaattaatataaaacatgaacccacagatctaaaacacttaagaaccccaaacaatactttaaaatgaaactattaaattcctgtaggccagcaataaagaagagagtcttaattagacatattgtactgttccacagatatcagattctctggtgtcaggtttttcttttttttttctttatgttagaaattggacactatctatccacctattttcaaggtcacaaataacttattctcttgtgttcagactgttttgaagccgaacataataaactctctatttctgatactgcactttttcattctaacattttcatttgttcttttttagagtttcagttctttactatttctcatctgctctcaatattgtccatattttccagtagatcttgtaacatatttatcatagttatttttaaacttgtgtattttaattctaacatgtggaccgtgtgactgatgaccgttatcagtaactgactctgattttttttcctcttccctatgggttatatttccccgcttcttcatatgtcttgaaatttgtattttatcatggatgttactttaacaaaacaggaacactgaggtaaacaatggccagaaaatggcatgactcttcctctgtcagactactgatgtggatggcagaactgatctaatttgtatttggcaagtgcctgggcttttgcacaggttttattagattcagtccactcccagcttcgaatgttttaaaggtagaatcaggtctttcccttagacgtgactttgaattatagcactggaaaaattctatatatttctctatagccctgctatcaaatatctcaataatgattaatctcactgattttcagcctgtcatcactttttgtttatttatttgttagtatacatctctccactcctcattcagtgactggaccctagtggactcatgtattacacaaaaggaaagacccatgaaccctgatgatgtcttgctcaagacactatgcagcttcttgtgtttctctctccgtttttctgagtatctgcccccagctactgctgtactgttcctatgcacttaggaaaggctccacgaaaaaaagttcgtagatgctgtaaactcgttttgtgacttaggtaccccatgattctagtcagttatatcagcccacatataatcacagaatttttaaatctgggctgctttcttttcacctacctatggtggttttctcctttttcctttttctgccatgtccctaaagatgaaagcttccacaggaatcttctccccctagaaatgtttccttcctttatacatgttagttttttagctttctttgtgctctcgcccatctgatggattaaaaataactaatatttattcccttggtaagacaggttgacagtctcttgcaactaacgagaagcagaatatccctgaattattattattattattattattattattattattattattattattatttcttttttttgagatggagtctcgctctgtcacccaggctggagtgcagtggcacgatctcggctcactgcaagctctgcctcccgggttcacgccattctcctgcctcagcttcccgagtagctgcgactacaggtgcccaccaccacgcccggctaatttttttaatggacttttgaccactatcttaagatccttatatcttcattcacagtgtgttttgtgtcctgtcactgtacttatacatttacgggtgtgtgctttttgaggtttgatattaggcttattttagcattatacaatggacagcatcctgggtatccagagattatagagaacacacaaatgaatgcagtctcagaaactattcaaaactgaatagttttgaaatctctgcagtaacaatttatagctaactcccagtttgtagcttgccatttacagtttactccctgttcagagcatgtcaatttgtagcttcattgaacatgtaagatatttgtttcctttactgactttccatgtcatttctaaccactgtgatgaccttgcctatttatcttgacctctgtaatgtattgtctgtatccaaattacctaaggtctcctttctatcccttttgttcaagaaataaatatttcttctatttctgtattttaaggcagtaaccagcaaaaccacgttatacctatagtaacgcggaagagtctaatcatgagatgcttagcagagccaatctctatagtaagctcaataaagtacatatgagttgcttattttatgttttgcagacattgctattttgggagaagtacaagcggaaaaagctgacgacactgaaaggcttgttgagatggaacaagtcctctcttcacttaacaagatgagaaagacaataggtggtgtggctctctggcgacagcaaatctgcgcaattgcaagggttcgcttgttaaagttaaagcatgaaagaaaagctcttttagcactgtaagtatcagagttgccataggttttctttttaagtcaatgcgttaaaaagcaaatctaaggtataaaggcaagcaaaaaaacacaaagatatgatgaattaggcagcagaaagggaaagcatcacagtggaagaagcacaggagagaggcagaatcttgacatccaaaggacaaatattgcatgaaattttatgggatatccaatggccaaaaagcaacaggagaaatgaacaaaggacaaatctacggtttaacatcttgaatttggagttagtaaaaggacaaaatactcaagaaatgtgacagttaattgtgtttaatttttataatttctttatcccattacattataaactgctcagagagtattagatcaggaaatgacattgcattcattttggcaattttcttttgtgtaggctattaattctaatggctggattttgccctcttcttgtggagtataccatggtgaaaatatatcaaaacagttacacctgggaactttctcctcatttgtatttccttgctcctggacaacaaccacatgaccctctcactcaactactgatcatcaataaaacaggtaaaatggtggatacttgatttccaaatacatttactgttcagagcagtacttagaaaacataaccatgagaaagaaaatagcttttcacttattcagcatgtgttaaaaaacaatttatgaaacttaaagataataaatacaggcccccaaagaagcaggaataggtaaagtattttctaaaggagaaacatctggtggcatcttgctaaatgaaagcgtttgtaccaaaatagcatttttaacaggttcattaagatatacttcacaggccatacaatttatccatttaaaatgcacaattccatggttttcagtgtatccacagaactgtgaaaccatcaatacaatcccttttagaatattttcatcaccccataaagaaaccccataccgaatagcaattactcccatgtcgtccctcccccaactcctcagcaatcacaaatttacattctgtttctattgatctgtctactctgaacatgtaatatcactggactcatacaacatgtggtatttggtgactgacttctttcgcttagcatgttttcaaagttgatctatgttgtagcatttatctatgtatcaatacttcatttttattgttgagtaatattttattgatggttataccacaatttatttatcattcatcagcagatggatatattttttcccaataattggatattacgaaaaatgctgctacagatgttcatgtacaagtttttgtttgaacatatgttttcatttctctggggtgtaatcctaaaagtagaattgttgggtcacgtggtaactatgtttaccctttgaaggacctgccagactgtttttcaaagtgactgtaccactttatattcacaccagaaatttttgtggggtttttttttttttttttgagatggaatctcgctctgtgtcaccaggctggagaccagtggcacaatttcggctcactgcaacctccgcctcccagattcaagcgattctcctgcgtcagcctaccaagtagctgggactacaggagcttgccaccacagccagctaatttttttgtatttttggtagagacggggtttcaccatgttggccaggatggtcttgatctcttgacctcgtgatccgcccgcctcagcctcccaaagtgttgggattacaggcgtgagccaccgcgcccggcctcacatcagcaatttttgaggattccagtttctacgtatgcttgccaacacttattttttgttttttctattacatgcatcatcgtgtatgtcaagtagtatcttgtgattttgatttgtattttgttaatggccagtaacgttgagcatcttttcgtgtgataactcgtcaattgtacaccttctttgtagaaatgtctgttttcttttgaaaaaatggattgtatttttaattgagttctaagtgttatgataaaaattcttttatcagatacagtaggtgctcatattcagattctgtatctaagaatttgcctattcactgaaatttattggtaacccccaattacatatctgttgcatttcatgatatttacagatatgctcagagaagtgaacatttttagtcacctgatgtacacattttcaactgagattgaacaaaataacactgctttcttgttttagctctcatactgtaaacaaatgcctttttgcaatctatttcatgccacatttttcacatttttatgtttttttgtgatgattttgctgtttaaaatgacacaaagaatactgctgaagtgtcatttagtgtttctaaatgcaagaaggctgtgacatgtctttttctagtttttttttgttttagggttgtcattatgaacagatgttggatttgtcaaatgttttctctgtgtctactgagatgatcatgtgggttttataccatattattttcagacattaaaccaaccttgcatttataggataaatcatacttggtcatggtgtataatcctttccattttctcccagatttgattttctagggttttgttgataatgttttccatctctattcataagggatattggtctgtagttttattttatgctaatgtctttagatatcagggtaatacttgctgcatataataagttggcaaatgttccctgcacttctttttttttttttttttttttgagactttgtgaaggattgacaatttttgtttattaggtagaaatgtactagtgtagctatctgggtgagggattttctttatgggaagttttgtaattagcaatttgatctcttaattgttacaggtctccttacattttatatttcttcttgtatcagtttaatagtttctgtctttccaggaatttttccattatactatattatctaatttgttgttacacaaacatattccattttaatccttttaatctgtaagactggtattcatgccctctttttgttcctgatcttagtaattttcatgttattttatttttcttggtcatcctagctaagggttcctcaattttgttgatgctttcaaggaaccaacttctagcttaactgtctctattgtttttctattgtctatgtcactcatttccaaaccaatattcttggtttcatttctttctgtttgccttgtgtttagcttgttcctctcttttcagtgtcttaacacagaagtttcactcactggtttgagatttttcttcttttatttaacataggtgtttacagctataaacgtccctctaagctatgctttcgctgcatagcataagtttcggtatatcatgttttaattttcatttatctcaaaatattttctaatttcccttgtgatttcttttctgactcattggttatttaggagtagactatttagtttccaaaaatttgtgattttctaagtttttgttgttgaattctaaattcatcccttgtggtcagagatcatagtttataaaatttcaaccgttttggatgtgttgaggcttgtttgatgtccttgcctttagctcatcttggagaatgttccttgtgcacttgagaagaatgtgcattctgctgttgtgggtgaaaatttgtatatttcacttttcagtgctattttgtatttcgagtctctcttaagtgtatatacgtttataaatgttataacttcctgctgttttgacccttgtatcattagaaaatgtctcttatgctttctagtaacattttttgttttcatctattttgtctgatattagaagagccactccagttttcccatggttttatcttgcatgatgtattgttccaccttctgctttcaatttgtatcaatgaaatttaatatgtgtctcctgtaaatttaatttgatatgtgtctcctataaacagtatatagttggatagtgtttttaaatacaatctaacaatctatgccttttgagtgtattattttattcacaaatcatatttttactaataatgtaggatttgtatctgccagtttattgtttgttttctgaatgtctcatgtcttttttgttcctctatttcttctttactgttttctttggcattgaatatcttctagtttaatgatttaattattttaacgattttttattatatttttgaattatgttcttggtgattgtttttgggcctagaatgtacatcttattttaatctacttaaagtttacacagatttaagattaatgtaacaaagtctacaaatatgtacttactctcctttcttctctcagcttctttaaaagatatgaaatcatactgagtaataattgtaccaatgtattgctggtttaaaaacatatagatgtgatatgtgtaataataacatcaaaatggggaagagtgaatacagctatatcagaggaaagagtctgtagctcattgaaatttttatttaccatttcttgttctcttcatttgttcctgtgaattcatattatcatcttatgtgatgtccttactccaatacagctaggcttccacctgcctcctttgtgccattgttttcaaatattttacatgtctatgttttacgcctcaacaataaaattatatacatactgcattatacatttgcttttaaaatgagttaatacaagagagggaaaaatacgcattatactaccaattataagtacatagttgtgtttgctgatcctctttggccttttcacttggattcaaattgccatctggggttatttgctttcagttttaagtatttcttataaggcaagtctgctataacaaattcttcatttttgtttatcttggaaaaaagttctattctaccttcatcattttttattctttattatttttatttttatagatttacaggataaaagtacagttttgctacatggatatattgtgtagtggtgaagtctgggcttttggtgtaaccatcactcaaacagtgtacatcatacctattaccaccttcatctttgaaagctagttttgctaaatataaaatacttggctgaatttttttcagtactttgaatatgtcattttactgtgttctggcttcctttgtttctgatgagaaatcagctgggttcttattggtgtttccttacacatcaccaaggaaacattctctttgcctttgtcctcaccatttttactctgatgtgtctgggtttggatctctttgcatacatcccacgtggagttggttgaacttcttggatgtataaagtttttaattaaatttggtaagttttcagtcattatttcttcagtggttgtttttctcttcttttatctctctcctctccttctgtaacttccattgcatatgaaataatgtgattaataatgtcccacatttttctgaggttctgtttttttattgttgttgttcttcaggttgcataatcccatttaatatatcttcaggtctgctaattctttctgctgatcattcaaatctactgttgagctccttcagtgaatttttcatttcaattattgtactttcaactccagaatttctatttggttctttattacttgaaataactttttattggtataatctgtttggtgagacattgtcatcatacctttcttcacttctctaaacatgctttcttttagttttttgagcatacttacaatacctgccttgaagtctttgttttttaggtttgctatctcagccttccaaaggcagttcttgttgcctacttttcttcctgtataagagtgacactttcttattttttagcatgtctcataattttggttgaaaactggacatttaaagtaatagattgtaacaactttgaataatgacccccagcttgtcttgaagcttgtgattattgtttactcatttcccctgctttatacaactctgatgccattcttcagaggcataactttggccatgtgcattattcccctgagatggcaatagatttagcagacctttctttgtctcttttcctgacctctccattacactggctaactctactggtatcacattcagttgttaggcaccaccagtagcaagctgattggcctattgttttcaaaaatgcccatatgcataagttgctccacagtttgatccaattacagtaattccctctcatctgaaacattacaagatccccagcagatgcctgaaaccacagatagtaccaaactaatggccatccataagaacacgtttctgttcatgttttttatccacaaatttatcgccttttccatcttaactaagcacttatcatgcactatggctataacttctacagtttgaggtgcaacagcaagactagcatgagtttcttttttcttcttcacaatttacagaagagatttgctctcagagtagatcttaacaacctcagcatacaatttttttattgtttccttattaagtcaataactttcacctttccacttaaaggaagcaatatatggcttctctttgacatatccaaattgccagcattactcctcttgtgctttggggccactattaagtaaaatcagggttaactgaacacaagcactgtgatgtcttgacagtcgatctgataacggaggtggcgactaagtaactaatgagtaggtagcatatgcagtgtggacacagaagacaaggggctgattcacatcctgcacaggacagagtggacgatacgagatttcatccatctgctcagaataccatgcgatttaaaacttatacaatgtttatttctggaatttttcattttgtattttagagatgcagtggactaaaagtaactaaaactgcagaaagtgaaaccatggataagggagcactactataaatatggtcttgtttgtaggaaaagtctttgaagccagttattgaggtgtgtcctctccacagaagggctcttcttaactctctgttttgctgctctctctagtaaacttttagctggtgtatggttcaaccaagggaattgcaatctcctgtcaattgcttaccaacaaaatcttgatggtttttggtgcactcttaggcctgaacttccccaaactctgttccaactaaagtcagtttatttagggagagtttcagcacatactgttcttatggcttgccgctgttcctgaaacaagaatctcaccattgcttcagagctggaagcatggatcgtgcctgattctcttggtgtggaacccctgatttgtgagcagggtacttggcaggggtggtggcctctggtcttctcagcttgcctctcctgtcgtggaaactctgccctacacgtgagatgggacaaggatgattgtgtcccggtgttttgggcctcttattcctagggtagagcttccaccttaggattagggaatgggtggaggaagagaactccagatctcttagccactcttgcctggtattgatcttctgcaacgcagatgtggggaaatgagaaaagtcgatgggaagcccctcccgtgaagatactatagccctgaactgggcttggggaatagggatccctgttcttgcccacaccctttcagagtgaagcttctattacacagatctgggaaggaagtggggagtagacggatcaggctgtggctcaaatgccacaatttctcagtgttcttactgagatttaatacattttattaaataaatgtgtcatcattttctgtatgctcttataacaatttcaaaacattttaatttgttggttttttaggaatttttataagttatgattgtttttctggggagaaggtctactgagctcctcacattgctagtctacatgttgtcttccagtatcaagaaaattttgaaaattaattaataatctagcagtagtaaaatgacttagcaaatttggtggttaatcaatggaagttatcagtatcattaaagctttattggttatggacattcattgcaagattctaaaatctattttgaaagacacttggaactaaaaaaatcttttacattaataataatcataagcaaataaaaatatcatgaaggaattccatgagaaataatagatgttatgtatgttatgtagaaaatatcctgacagtccatattactgcttcacataatgacattaactgtaatttgactacacaacttgacattaatgtttttagttttgtgatacctaatatctttaactacaccttaggggcaagcattgatgactttatacagtctgtggagcaccagaacatagctttagaagtggatgcatttggaactagaaatggcacagatgacccatcttataatggagccatcacagtgtgttgtaatgaaaaggtatgcaggtctctaataatctttctgaaaaatgtgaaaagctaacataatatcaatatactcaggcttccaacttaagaaataaaaatgaaaagcaaatactgttttcatttattacttagtgaattgtattcactggcataaacaattcatatatccatcattgtctactggcacaaactattagcaaaatacatactatagaatacctactatcaagactatatataagttcgaacatttcatgtttcccctcaaggattttataacacatgtattccaaaacttctgttttgttcttaaacaataaacactgaacatatgattctggcctcaagcaagacatccggtgtcctaaatatcagatacatgatttagttttactatatacatgttttgatttacttatacagtatttgattttacttacacagtgtttggctttttattgtgattatttaacaccatatgaaaaacataacctcttaatttaacatgtcaaattttgacttttttagagaacaaaatgaagatatttgagaacttatatcctacttgttatattttagaattacagcttttcgttagcatgcaatgccaaaagattgaattgcttcccagttcttatggacattgttagtaatgggctacttggaatggttaaaccatcagtacatatccgaactgaaagaagtacatttttggaggtaaatatatataatcttacaattcctgactctcctctatcaggaatctcccagatcacccttttaagtgctggaatcttgtttttattgagtaaaccactgcataataaattaacatttggactcattctagttctgtgactttggaaaatcaatacgttttcagagcttcaatttgtttaaagtaaaataaaatgaacaaaacatttttcaaagagaataatgagatcacatggacacaggaaagggaatatcacactctggggactgtggtggggtggggggaggggggagggatagcattgggagatatacctaatgctagatgacgagttagtgggtgcagcgcaccagcatggcacatgtatacatatgtaactaacctgcacaatgtgcacatgtaccctaaaacctaaagtataataaaaaaagaaaaggaaaaaaaaaaaaagagaatatgaagcaataaaaatgaaatcttacagcactgtgaccagcacaagaatagtgaacaaatgaaacaaaggagaaaggaaggaaagaatgaaggaaggaaggaaggaatgaacgaatgaatgaaggaaggaaagaacaaaggaaggaacaaatgaaggaaggggctttattattacttttagaaattttacaaaagaaattcaagacaaagttcaggctagaatttcagactatctacattagaattactgcagattcttgtcaaaaatattaattcccctggcctactccagaccaatcaaaccacttttcctcatgggggtggtgaaaggagggaatctattcttaaacaaaggtccaagtgatcggaatgtatatagccctttaagtttagaaccagaataactaaaagtttgtaatgattcctttttaattattgaatacatacatttctccctttcagagagttctttgagcacatagatcatgtatttttaacactttataaataccttgtacgtaggaaaaaacctgtaacatgataaacatgaaacaacttaattgttaaatacataagtgagtgttaggctcatcaacttatctacatctcattctagggttttatgataatatatatggccaataatcatatactcatgtatacataaaatggatcacatatctgtcattcttttaaatttatttttagaggcagggtctcgctctgccacccagccggagtgcagtggcaggatcatagctcactgtaacctcgaactcctgggctcaagagatcttccgatgttggcctcccaaagtgttgggattacaggtgtgagtcactgcacccagctgccagtattattttcatatggtccagcaagatcttcagtttccttctcacaccatatctcactgtactcaggaagtaaaacttcctttcattaaggatgtgcgagaaacttaatcattaaagtaaatgattttagggacccaccaagtattaattaattttggaatatatgctatggttcacttcattaacattttgtgactgtgaagaccttttaattttctggtttctgagagtagtatgcaataattgggcaaattgcctcagacttctatctatcaagatatcctgtttcaactaggattaattagataccaaccagctcagctgactttgtatttatgtgcccaatatagtcactttaaccaatatccccagcaactcattttattctctattctactttacctgctcattgcccgcaaagtcagagttgcccagattttcagaacttgcttgtatcctgcccaaagtcaatagattggccactaagtattgaccctacccagtactcaggacattctggaagcatccagacaataagctataaccttaccatctatggttagcaagtgtctttctggtgaccaagctgaagaccaccaggctctggttagaactttcttcagtaatgtgtttaatcaaagaagcaactatgagaatcatgaaaataacatgggactggctttcaagagagtttgtgatcttttatccttaaagatttttacaaacaggagtaacaacagatggaactagggcaaagattttcttggtgattttgctctcccttctagtacttcatctctccttttgcgtcctcaaccaatatttatctggtctcatgatgtacctaaaaaactgacttattatcactgtacccataaaatgttggatattttttgagttaagctgtcacatttgagataaagatcagctaagaaattgaatgtatcaactgtgaattataatgtattatttagcaccaaaataaattttagaatcataaagcaagaaaagagaaaaatcttgttcttattattttccaaatgttatcagtgcattcatcttttcaatcacttatctgtaaatttgagtagaaagccaaaagttaagtgtgaaaactggaaggataatgaaggaatctgggaatctcaaaagggacctaaggcagaattatgtaaacttagtctaaaattttaaaaatgtattccagaaaattaactttaaatttcttcattcagttcattgtattctttgggtttttcagaatggacaggacaatccaatcggattcctggcatatatcatgttctggctggttttaacatcgagttgcccaccttacattgccatgagcagcatcgatgattataaggtaataatgagtaattgcaacttccattattttgcataattgaaagcagaaggtaattttacaatttttcataagaatatttctacatgcttaattgaacagccaattcagacataaattctaagttataaaaatgaaagaaagttttataagttgaaatatatagataaataggtaatagagaattattctgaactttatctggatattccaacaagctagaatagacaaaccaactctgaaaaaaaaagcaaagctggaaaatatgcttctgacttcaaggctcactacaaacttgtagtaattaagaatgtgttgtattaattaagaataattatgtagatattttaaatgaaatagacatttcagaaataaacccacacatatatcaattgattttcaataaaattaccaaataacttaaataggggtaagattagacttttcaacaaattgtggtggaacaagttggtatcattctgaaaagaaaaatgttcttaacatccgtcacatgcacaaaattaatttgtaatgaatcacagatcttgtgataggcaatatttttcagatggggaagaagaagcatatgctattttaaaaaagataacttgaacttcatcaaagttaaaagcttctgctctttgtaaaacacgaataaaaaataaaaggcagccgagcttggtggctcacgcctgtaatctcagcactttgggaaaccgaggtgggcggatcacctgagatcaggagtttgacaccagcctggccaacatggcaaaaacctgtctctactaaaaatacaaaaattagctgggtgtggtggtgcatgcctgtgatctcagctactcaggaggctgaggcaggagaatcgcttgaacctggactgcggaggttgcagtgagctgagattgcgccactgcactccagcctgggcaacagaccgagactccatctcaaaaaataaattaattaaataatttaaaaataaaataaaaggcaagccacaggctgggagaaaaatattaactatacttatatatgtgacaaagatttgtatcaaaaatatgtaaagaactctcattcctctgtaatagaggataacctaattttttaaatggacaaagtatttgtatatatactttaccaaagaagatgtacagatggaaaatactcccatgaaaagatggttaatgtcatgagcaatcaggaagatagcctcagtgagatagctctacacactcaataaaactaataatgttagaatgaccaacactatcaagagtttatgaggatgtggagaaaccggaactctcatgcattgtgggtgggattgtaaattgtacaatcacttcgcaaaataatttggctgtttcttataaagttaaaaatatgcttattgttataacctagcaattcttctcctaagtatttactcaaaagaagaaaaaacatctttccacataaacacttgagcattaatgttctgaatagcattaatcataacagccaacaacttgaaacaacccaagtgtcccccaagcagtgaactgataaacaaattctgatatagccatacaatggaatactattcagcagtataacagaaggaacaactaataaatgcaccaacacaggtgagtctcagaaccattacactgagggaatgataaccacaaataattaggtacctttaattaggatgatttaatttatataaaattcttagaaaggtaaaattaatctatagtgacagaaggcaggctcggggtgtggggggtcacttgtaaccagtggtaaaggctattgactgcaaaggatcatgggaaacttcaggggttgttctacaccttgcctatgattgtggtacagaaacatgcattcatcagacctcattcagctatatacttagtatgggtactttttcttgtttgagaattataccccccaaaattaaaaagagattgttgaaataaaaggaaatgatatttttggaaatgcgagaacttgaaaagataaagagaaaacttcaatattgaactgacaacttacaaatgtttatttacagacactcattaatccaaacgaatctataatgtgtttacaaatcacctgagcatcttgtttaaaagatgattccgattcagcagttctgcagtggagccagattttgagtggcaatcttaggcggtgaatttatatgattaataacccaggccaactcccatttttgtgactttatggaaaaagtctatgaaaccttgtgtaagcatctctactatgtcatcttcatctgtttcgttttttctctctctctgttgcccacaaaaagagtgtatggtttatgtaatgttcccttttcatgtggaacatgcaggaatctcaagaaattccatttactagtttgatgtaactataagtctttctggtgttaacataatccaaactttaaaacttcctccgcaggaaacatgaacactttctttggcttttgtgatgccacaatttcaccatgtttatcctaagactgtccattgtttgtctcctttggagattctcattcctctatgtaatatttaaattttggaaatcctcagatattggcccttggctgtcttctcatgttagataccattctgtcttaggcaaacccatctagctctatggcttcgaatcccctctactggctggtcactcctagatctgactctaccccagatctctaattgtatctaatttgacctccaaggttgatacaaactcccttctcagcatttccacagtaggcaacacagatgtctcaagtttcatgcttccaaaactgaactgaatgtagagatacttaaatgtcttccccccttgctattttctccatatatagcagcaccacatgctcagtcatttcctaaagatccaaaaattatcctcaattcttctcttgcctctaatatgttgagtcaatcatcaattccttaccaattcaactacctgcatagacctgtgtctgatgttgtgaggctctgatatgaatctttaggtcaaattatgtctcaggcaggagcattatttagctcatcaaagcccatcaacaaatgaatttaagtattttttaaaagaaaaaaattcacaactcttagaatagtttaatatacaaacctattgattatactgaaaaccacatcacttcataagtagttttaaaacatgtaatttggtatgtttatttagggaatgacaaataatgtaaaatacatttacatttgtaaatgtatttatatttatgtagatacacataaatatttgaatcagtgataaatacttgaatgtggactatggcagaacaacacaatttcttttattccaattaaaggataaagcaattatatatgtgtgtgtgtgtgtgtatgtgtgtgtatatatatggagtgtgtatatatgtgtgtatataaaataaacacacatatatacacactccatatatatatccatatatatgtgtgtgtgtgtatatatccatatatatgtgtgtgtatatatatccatatatataatatatatatccatatataatatatatatatatatggatatatatatatatatatatatatatggaggagagaaaagagagagaggaatcactgtgatgagaaggtagttgtttaagggaataaactgtccatcccattcacccctacccacctgtaagtcattaaatcactgttttgtttgctgcagtgttcatgctttgatcattctaaggtcttcttttacatatttctgccaggtgtgtgatgaacatcaatgtagttcattaaagcagcagactggttatttatgtttgtaactatccacatcccttagtccagattacatttgtagacataatctagaattgttacaaataaaggttttgtttgaatagttccttgcataatccacatattcttaagccacaaactttgtatctttgctgtctcctaattagaacagagctcggtcccagctacggatttccggactctccccttctgcttactggtttgggcaggcgctggtggatgtttccctgtacttcttggtcttcgtttttatatatttaatgagctacatttcaaacttcgaagacatgctacttacaataattcatattattcaagtaagtgacaatatccaagtaagtgacaatattcacaatatcattgtgtgatttaatttgaaattttggaacatttctatcaatatttatatggtcataaattaaagaactataaaatcctgggctatgacaatgttttgaatcctaaatattttccttgattgcatttgtatttaactaagcttcacattcctgttgattttagatcccatgtgctgttggttattccttttccctcatcttcatgacatacgtgatttccttcatctttcgcaaggggagaaaaaatagtggcatttggtcattttgtttctatgttgtaagtatatttcttgtggatgtatactgtatatatttgatatacaattctgagctaatcctttaaattttgccctctgtaggatgataatattatggtctataataaacacaagattacaaattcagttactgacatggtcaaaactagaaattacttcaccaaagtccctaataagaattaattccataaagcctctcttcttttgtctaaattaggaggaaacgtgtataatttaagagtgtctattctaatttcctatgatttcaggatgccaaaaggtaagttattaattcaataaataattgttgacttctgcagtgtgtccaagttaagattgataatgggaggaaggagattaaatggacagtttcaatcctgaaagggctctcaaaagataaacagatgagtaagcaaccacttgttaaaatagtcacgagttattttccatcttaagagtctattatacaactgaataataaagaggtccatgaaaaacagataagggagagattcatttgtgaaaatgaaagcagagatttcttttaaaagatgaaatctgaaaaagagtaagatttcagccaagagaagtatgaggtacaaatagagataacgaacagaaacctagcagaggaaaagcccaagctgatcctaggaactggtaataatctctcctagatatagacaaaaaacaaggtgcacaatggccatggtcctaggtatggcaaaaaataaaatcatggcggcccttaaatgatgttctcaaggatttaaaagcttacagagcagaacagaaataggattagagataaacttgcaggaagaatactttgatagccataaaaatgatggtttggaagacagagaaattagaagtacaacaacttttaagtagtcattacagtgtattagaaggtaaaatatgagggcttccagtgtacctatcactttctgttatccctaattttgtattttagtacttctgcttaagccattccatgttgttaaatgcttctatttccccattggtatagttaccaaaagtcctacctttcatttttgttgttttattcctgttagatatcaatttcaatgttttctttgatttttgatcatctacttttattttttaaagtttatttactgtaattaaaatattatatctatgggtgctgggtgtgtcttatacctgtaaccctagcactttggaaggcctaggtcagtggatcacttgagcccaagaattcaaggccagcctgagcaacatggtgaaaccccatctctactaaaaatacaaaaatattagctgggcatgttggcatgcacctgtagtcccagctatccgggagtctgagggaggaagatcacttgagcccaggagtttgaggctgcagtgagccatgatcacgctactgcacttctacctgggcaacagagcaagactccatctcaaaaaaaaaaagagagaaaaaaattctgcatatcacatcctagatttatcaagtgatacctcatttgtgaaactctaggccaaaggaatttggctaagtcactaaaataaactgttaatggagatatactgatttcagcttggtttgcaagattggagttgaaattagtaatatcttcaagatgagccatctcgatttggaacttacattgaaattcagagtgattaaccttcatatttgcttcttttaggtcactgtattctctgtggctggatttgcgttcagtatcttcgaaagtgatattccatttatcttcacttttttaataccacctgccacaatgattggctgtttgttcttatcttctcatgtaagtaatgacacagtctgtcccagtcccttgaaactcatgaccaattgtgaagctttgcccaatgttgaaggtctactacaacatgtttaaagtgcatggggttcaaagatttctgcctgacggaatccaattgattttctcccagataaaacaatatgttccagctgactggtaatggaaaatttggtcctgattaatatatgggaaggaagggtaaggggtagtgggaaacagagtagtccttatactcatgtggggccttatttcctccttgatatgctcggctttagaaggaagcaaatgaaatgtccctaatctttgggatttcagagttctaaagaagcacccaagataagcaaagtccttttttctggctgactgatacctatacctatgcaaaaggaaggaagttactgtacatgagtgaagaggtatctatgggaaggggaaaggaagagaaggggccccacaaagagaaacgatgggcacaggaaggtatgtgaagttctgtgtgagaagaataaacactgtctctcactgtttggggaggttagcacggatctccaggattctctcgccaggtgattagtaattgataaatcctattgcttcaaacaaaagctcatagaccttgggaggaaggaagacagccccttgctatacactttagaaaggacacttaggtgatattcatggtcaaatgttagcagggctgtttagggccaattcacgtatatgtggacaaaattcaggaaacaaaaaactccctgtttagcaattgtcttttcttttgcagcttctcttttcttctctcttttctgaagaacgaatggatgtacagccatttctggtattcctaattgtaagaacacactgttctttaaaaattatcactttttactaaatttaataattttcagttctgtacacactgtgaaacttcttttattaagttagagatacaggtatctatagcccaaggagatataatgcttgtaaaatccggaagaattatttttacaaagatcaaatgaccaggtaatgtgcctcccaaattttaaggactctgtacaactgttagaggaaatgagaaagtaataatatcacataactatagttgtttcctacgtttctataaaaaagattgaaaatgaacttgatagtttcacaatttgctggataggttattaggagtttgtaattatttcactgaatgtatttttttagaagttcggttattattagtatatctttgatattgaacaattatctttttatgtttctaattgtgcatctctctttattcctagcctttccttcattttatcatttttctttttactcttcgatgtctggaatggaagtttggaaagaaatcaatgagaaaggatcctttctttaggttggaaaaaacacatcagatttttattttgttgatcaatatcgtaaaatatttttcatgcataaatcaattcattaacaaagaggtgccgttgtgctaggataggctggagtaggaaccatgtgcccatacaaataatacagatccagatacctaaacccaagaagattatgatctagtggaagaaacggacctgaaacatggagtattaaggctctatctgacactatccacagtggagcactggggaaagttaaatgtggcaggtcccatctaacaaacaatatattgccagttgaataaatgccattcatccaggaggaaggaacagaatgatccactggccaaggacagcaatagctgtgttcttttcctggtagtgagcatcccagccagtggatcacagactggttcagttattaatgggacttaaaagctgagactattttcggcaccatacaaagaagagtgaccataagcatcttgctccctctgtgtctcccaaaccacatcagtttcatcttttgctattacagaaagttggatgggagactgccaagatgaaagcagacctttaataaatcttctgagatcagtatgaaggaggcactcaagggaagagagactagaataagtatatcctggatattatcagacttagaatggagaggaaaagtcaatatgccacatattctgaagaaatgagagatcaagcatctaacttgtattttgctagaaactcctgattacaaatattctggcccattttccccatgaaaacataatgatgtcaacatggtggtgtcaaagccagggttcccagaaaaattacttcattgagctatgatataaaaattcttcgtcagctattaggtttcaagttgatattgaaaaaaacatatttctatagataagataagcaaggaggttttaaggggatgagagttgtgaagggagattatgatggtttgttaattgctcgtactactcaaacatatgctttaaataatgcaacttttgatacaaagatgaaagccagaaatcaatattaatggatggttttgactctagaatttctccaagaagtagtgatgtgtgtcaaaatccagaagaaccagaaggagaggatgaagatgttcagatggaaagagtgagaacagcaaatgccttgaattctactaattttgatgaggtaaaacataacacaaaggtttttttattagtcagtctaccagtctaattctctaatgattttgagtttctctgttccttacaaatgaggatcactattttagtaggtaattgccatttttacgattaaatgagcgactaaaagtcatgttaactcttttgttcttagaataaattaaaaatagagtgcaatagaaattattaaagccaagaaagaatttcagaatctgagctaagcagcagacatcattgcttgttggagaaagtgcacagtacaaattcagggtcaggtccagcccacagcatttgttttgttgtttgaggataatcagtgcttctctaagtttcattgcccccgtttgatctgaaaggacaggcaagctgtataaaatactgtgctcctgaaaaaactgcctttgtaggagaggaaaatgagtctctcctctccaaaagcaagtgttaggatagggcatggccaaggagcatgtcaccaaatagaaggtcttctttgatgcatggctggggcaacaaagggtccagccaatgggaagatggaattttgtttcaaagctaatggagagaattaaggtctgacataataacttcttgtcatttacagaagccagtcatcattgccagctgtctacgcaaggagtatgcagggaagaggaaaggctgtttttccaagaggaagaataagatagccacgagaaatgtctccttctgtgttagaaaaggttggccatagggatcttccacttctggctcagagccctcctcagaggttcctggttcctaatgagcattattctggaaaccacctcttggttcacatgcagacccagaggagaatgacaatgacagcttcctttgtatgtttcatttctaacttaaattaactcacctcacaaagaggagcctagtcacatctacaactaaaccataagctctctaataagatgaacttttgaagtaataacatttctattaaatgaacacaattgatttcctaaagttcattgtttttcacaagagaaccaagatgtgctagcacactctgaaggcttggccagcaagtgttagatgacctcagtttgtgccattattgcaccaaggttaggatcacaggagacagaatctgaaacacttggcttccaagagtggttttgccactttccatcagtgtgactttgcacaggtaaccccatcattgagagcttctgccccaactacataagaaggggctaaaataacaacttctcagggtggttgtgacaattaaatgacaactaatagcaaatgcttgtcacatagtgagatttcaactatgttttactcttaatgttaccattaaaatagattaatattaagtgtaacctttttttcaggtgaagttttaggattattaggacacaatggagctggtaaaagcacatccattaaggtgataactggagacacaaaaccaactgctggacaagtaggtgaattatgtggaaaatatgttatctaatggtgaaatagattgataagatttgatgaccttaaaaacaacagattccacttaatccttatataactgaagtgattaatgaactacccaagagaataaattcacgaattatcacataaatgcacacaaaagctaagcactgaaaggttgtcacagaatccttagggtgtcgcttttccagtcaaaacctctggagctggtggcgcctttgcccaagtttggctcagacccgctgggctcattctgtccactcagctcagcaggctgcactctgttcatgccaccagcctggatcccaagcctgccaagaatgagccaggtgcatagcggtgatgggtgtgtgagcaagcatggggtctggctgctgcacacagccaggcatgctggttgtggtggggcaggctgctccaggcactggcacaggcgccacctccatgcttgcatactgcaagcggcttccactgcaggcaccaaaaaatgtggtggcacccagaagcttggaggtgccagaaaccacagagccctaaaaaggatgtcacagccctggctcggggatcccctaagtctgggatccccgaagggctgcagctcttctctgcttctcattgcctgcaacatggcaagtggggggcatgtttcagccctgtttgtgttacagcttttttagtcccaccatttggcaggtcctgagctcttgtcccatgtccaggaagaatgaggtatgtgaataactggaggtgaggagcttcactgagcgacagaatagctctcaggagacccaaagtgggtctcctatttgtaggcaggtcatctcgatgagtgtccagcccctaatggagaggagacccaaagtgggtagctcctttctgcagctggtagtccctaagtctgtgtgaatctggctgagtccaggatttttatgggctcagaaaggaggaagtgtgtgccatttggtccatgagtggccatgggcaggcctggaaaaagcatcataagttctcactctgggtcacagactccacctagaaccggcagcctggcacccaggcttcaggccatccctgaagcttgaaggtggcttgaaggtggggtttcaccagagaaccacccctttctatccaggaacctgtctgcctgctgccatcaacatgccatctatggcacccaggtggtttgtgctgaggtgcacctgcaagtccatgctgagctgccctcagcacccccccggactccctcccacacttgtcagggcccaaaatccagagcgagctgaggtggcaggaggctggcatggcagttccaccctgggcacgtacacacccagcagggttgcaacagcacctgggcttggccacaactttgctccaaaattggagcatgcaactgcccctgagattcagtaaaggatgctccaattcagcgaagggcagggctcttacctgtttctggcccctgccagtcccccggagtacacagccccagtcacacctcccctgctacagccagcatctttgctgtggtggctccagacaggctgccactgccatcaaggagtaactattaaaggtattaagacgtctcccttgctgcagccagcatctttgctgtgatggctgcagacgggctgcagccaccatcaaggggtaattattaaaggcattaagagagaatgtccagcatcagagctgaaattaatgccagaattcacacacatcctatttatactgccatcagtcacacggatttgcactttcagtgagcattgtctttccagtatgtaatatttaatctttcataaaactgtttttaaaaaactgtattagacagttgtccttcacaaaatgcttagttattggaacatacatttttgtgcaaatgcaactatttttggggagtgttttcaagaaatagatcaaaaattagatacaagggggtgaaattgactttaattgtacttctaatttagttgtataaggtggctaggcaaacagaaaaagagctcaggtttatctaagagagacatcatggggtagagataaaacattttctcctaaattctatggcagaagatagaaaaccttaagaactcttttacaaagaatgtccaagggaagtacagaacagaatataaggcagatgcctgtgaaactgtaccgtgggaaaggggctagtagtcaagccaagaaaggaaaagacagcttggaatgctattgacaaatactccactaatgaaagaagagaaaaccgatattcacaatccctctgtagccacagtgagagcagatgttcatgaaggtacctctctgctggtggcttggccaactctaatttagtccttaacttcaatcatggacaccctccaactcagtcaccacctgggcccaaagtcagtattttatttctcattaagcatgggaggaaaggagataactgctcattaatacattggaatgaaatcttgtaaaaggtaagtctgacctgaagtagaaagccagccatttgggtgtcacaaaataagcttaattggatcagccagcgtgagtttttttaatccatgcattctcctgattaaatactttcagtgaacgcttgctgctctatggctggaaggacacatccctgcttgtcttgcaagcagctgcaggaactggcttccctgtccctcttgccacatatttgtcctccccgtcaagcttccacatcaagcttcatccccacacagggctttggtctcgctcttgctctgccccagattccttgctcttgcctttttttccatgactagcatcttctcctctttgttgaaatggccctcagaagacaggctctttctaattaccctacctactgccacttccccagttattcttaccccagcctcctgaatttccataacagcaccacttttgatctgtctttattctgcatgttcatttctctacttgtttattgcctgattcattcagtagaatgaaaactccagataacgaagcactagttattccaccctccgctgtacccacaggcaacacagcacttgttacataggaggtactcaaaagatgttgatccatgagcgaagttaaatagtaattcaatcaatatgcttcattttgacagtgatttaaaaaaaatggatataaactgttggccaggatggacaggcaccacatttatgggatattggatttttcagctgagattggattgttggctgtggacacacttattttcctgtatttgctctctgacaacctttctccaatgcaaaatgattacagattattaaacccaatgaggtttagagtttctctagtttttctaggttcgtgaagagaatgatgtcatggaaatactcaaagaagcagtgcagaaggtaggttctgagagggaactttcatctgcaggtgctactgaaagggagcggtggaggggatgccctggagttcctggggtactgccctcaggagaacgcgctgtggcccaacctgacagtgaggcagcacctggaggtgtacgccgccgtgaaagggctgaggaaaggggatgctgaggttgccatcacacggtacacagaggagccacatctgttctatacccaagggaggggtggaggaggttgagagtgatgaccctcacaggaaattcaggatgggagactctaaatgctgacccaggtcacactgggtagatttacaactagaaactcctttcctggatatcaaagtattaagtttctttctcatattaaataagaaaatttaaaaaggctgggcgcagtggctcatgcctctaaccccagcactttgggaggctgaggcaggtggactgcttgagctcgtgagtttcagaccagcctaggcaacttggtgaaacctcatctctaaattaaaaagaaaaatacaaaaatacaaaaattagccgggcatggtggtgcgcacctgtggtcccagctacttgggaaactgaggtgggaggatggcttgagccaggaggcagaggctgcagtgagccaagattacaccactgcactccagcctcggggatagagtcagaccttgtctcaaaaaaataataataataaaatttaaaatttaaaaagtaattattcattgctaaaatgtatagaaaatactaaaatttggactgtcatagaacaactatttggatatcatgtcatgtccttctatttcttcaaaaagcaatattatcttttgtaggggagcaagtcagccagtaatatcacccctccttccctgccccccgaccacatgtatttccagaactgcatttttgagttctgcttctccacccttgcttgggttatcctcttatctatttcctcttgtcaagaagactgtacgactctcctgtttccttcaggttagtggatgcgctcaagctgcaggaccagctgaagtctcccgtgaagaccttgtcagagggaataaagagaaaggtacgggcagggcttggtgttgctctgcaagtgccatagatgggaaccagatgggctgttcctcccgttgcagctgtgctttgtcctgagcatactggggaacccgtcagtggtgcttctggatgagccgtcgaccgggatggaccccgaggggcagcagcaaatgtggtgaggaacattaccacggtcagggacagcacggatgacttgcatggagcctgtgaaccatttttcttctgtaaaaattgtcccttaaactcttttgtggagaacaaaaaaactatcaatgtcacttgtaaaaccaatactttgcaaaaaaaaaagatctttccctgatgatattttacaaccatttcttattgaagaaagaattaccattgttagggcccataggtctcactcttgagtttcataagcgctcagctgatcttttaggtgcatttctagatcacaatcacgtagtgttccatacttagcatgagaacagtagttctcattaaggtgtaaacatggttgtcattgtacgtgtttactgtacattttattttcttctcactaggttgtgagacgctgttgttaaattttatgtcattctgttccccttcacacagacttctcacaaacaagcctctcttgcttagcacttctctttgaacacaaccctataatgaatgttgtgttctgtaaacgcccctcttccaatgcatgattccagtttaacagctctcacctagcttgtccttcctcatcctacctgccctattaagaaccctcttttacttaatctctttttgctaattattcacacgcatgccagttaaaaattcttttctctatctctttctgattaattagaggatttcctaaattgcaaataatctcttgacattataggcaggccatccgggccacctttagaaacacggaaaggggtgccctcctaaccacccactacatggcagaggctgaggccgtgtgtgaccgagtggccatcatggtatctgggaggttgaggtgagtgcctgtcctggacccacacttgagcccaaggtgcattgctggaaatttttgtctgtggcagggagagatcactgaaaacagctgaaatgactgtgcccaggtctaacaatagggaccttgagacaatgctagcagcaaatcaagtttctcaaacaacatactgaatggttttttttttctcctttctcatatgacctcatcctccagatgtatcggttccatccaacacctgaaaagcaaatttggcaaagattacctgctggagatgaaggtgaagaacctggcacaagtggagcccctccatgcagagatcctgaggcttttcccccaggctgctcggcaggaaaggtaaacatggttgctgttttggaaatggtaccaaatgttcactgttacttgtcagttatgttgagtgatagtcattcaaaaggaaaacctaaaagaaagagattatttgttggattctgcaggaagtaaactagagaagagaaagcagacgtaagagctgatatagcaaatgtcatggttccactatgcgccaggggctgtcctggtattgtgttatcctatccaaaacttacagagacttttcaccgtagacatagctattccagtaaaaaaaatgagtagacttcaaaaaagcgttgtgagtatccttcgtaaatgaaattgattattatctttatgaagtggaaattggctgagagacaggttaggtcacatgagaagttaacaagtggcagaaccaagaggtaaacctaattattttatttcaaatcaattaacatttccaattttatgtaaattctggtaacagcatcatcctgatgtatttattttcatagacagaaaaaaattaaagagtagccttaggatcatttttaacacctagaatttatagcagatgatagataatttaggagttaggtgaaaaaaatgataacaaggagaaataagtcatcataacaatgtgggaaaatatatttctacagtgtaatataaatggaaaagcaatgctataattcaatgtccagctcatggctgtatagaaatacatcatgaagccacagggaataagcgaaataggtgagaatgactgcaccataaatatatgtaatgatgtcttgtgaaatgaaatgtaaatcttcttaattttcaaatgatgaaaagacaaacatttatctgagaaacaaaatattaaaaaatgttgttgcctaccttatttggtgctgaatttctgctcttctaaccagaggctcaattacattatcctctattaggaaggcagtttgagtaggatggaggagaaggagagatatgtgacttgtgggaaatatatctagatttctaccctatttgaggaactttaagaaactatgcagtataaattccttgttgaaggatgaagttgaagatcaagtattcagttagaaaacaaggtggaagatgactttggcaaatcttgaaatatcatctggacagcacctactcacttccatccaaggggccaacaacactaaactgtctgagtattacactcccttcccccagttctccttgtgaactgcttccttttgattattatcaattcaccttacccttttttcctacacaaaactgactctcatttatagaaataacaacccacatacaaagctacacaaatcaaaacaatatggcactagtgtaaagaccaacatattgatcaaaggaacagaatagacagccgagaaataaatccctgaatatatggccaactgatcttcaaaaagcgtgccaagaatacatgatggggaagggatagtctcttcaaccaattgtgttgggaaaacaggatatccacatgcagaagaatgaaactagaccccatcttatgccatacacaaaaatcaactcaaaatggatgaaagacataaacataagacctgaaattgttgaactcctagaagaaaacataggaggaaagcttcatgacattggtcttggcaatgagttcatggatatgacaacaaaagcatagacaataaaaacaaaaataaacaagcgggatgatataaaactagaaagcttccacacagcaaaagaaacaattgacaaagtgaaaggcaacctatggaatgggaggattatttgcaaattatatatatgacaaagggttaatgtccaaaatacagtcatgcactgctgaacaatagggatactttcagagaaatgggtcgttaagcaatttcatcattgtgtgaatatcactgagtgaatttacacaaacctagatggtgtagcttactgcaaacctaggctatatggtatatcctattgctcctaggctacaaacctgtacagcatgtgactgcagggaatactgtaggcaattgtaacacaataagaacttgtgtatctaaacatagcaaaagatagagtaaaaatcggcataaaagataaaaaatgatacacctgtatagggcacttaccatgaacgcagcttgcaagactggatgtagctctgggcgaccattggtgagacagtggtgagtgaatgcgaaggcctgggacattactgtacatgacttttataaacactgtacacttaggctacactaaatttacttttaaaatttatttaataaattaaccttagtgttctgtaactttataaacttctaaaatttttttaactttttaacttttttgtagtaacacgtaacttaaaatacaaacacattgtatggctgtacaaaaatattttcttttttcatatccatattctataagctattttctatttctaaaattattcatttgttttttctacttaacattttttattaaaaagtgagacacaaacacacacacattagctgaggcctacacagagtcaggattatcaacatcactgtcttctatctccacatcttgtcccactggaaggtcttcggggcaatgacacatgtggagctgtcatctcctgtgatagcaatgccttcttctttttttttattttttttattttttattttttatttttttttaattatactttaagttttagggtacatgtgcacattgtgcaggttagttacatatgtatacatgtgccatgctggtgcgctgcacccactaactcgtcatctagcattaggtatatctcccgatgctatccctcccccctccccccaccccacaacagtcccagagtgtgatattccccttcctgtgtccatgtgatctcgttcaattcccacctatgagtgagaatatgcggtgtttggttttttgttcttgcaatagtttactgagaatgatgatttccaatttcatccatgtccctacaaaagacatgaattcatcattttttatggctgcatagtattccatggtgtatatgtgccacattttcttaatccagtctatcattgttggacatttgggttggttccaagtctttgctattgtgaataatgccgcaataaacatacatgtgcatgtgtctttatagcagcatgatttatagtcctttgggtatatacccagtaatgggatggctgggtcaaatggtatttccagttgtagatccctgtgcaatgccttcttctgaaacacctcccgaaggacctgcctgaggcttttttacagttaacttttttataagtagaagtagtacactctaaaataatgataaaaagtatagtatggtatagtatagtatatacataaactagtaacatagtcatttatcattatcaagtattgtgtactatagataattgcatacttttttatgattggcagcacagtaagtttggttacaccagcatcccgacaaacacataagtaatatgttatgctataatgtcatcatggctatgatgtctctaagcaatagaatttttcagctccattataagcttacggggtcactgtcatatatgtagtccattattgattatgacatcattatgtggcctatgactgtgtataggaaattcctaaactccagtagcaaaaaaaaactaataacccaattaagaatgtgctaaggacttgaatagacatttctccaaagaagatatgcaaatgaacatgtatatgaaaaactgttaaatgtcattagtcatcagggaaatgcaaatcaaaaccacaataagatatcacctcacatctgttaggatggtgctatcgtttgagtgtcccctccaaaactcatgtcggaatttaattaccattttgatggtattaaaaggtaggaccaggtgggacctttaagagattattaggtcatgaaagctctgccctcatgagtggattaatctattcaaggattgataggttatctcgggagtaagttagttatcttgggagtgggtctgttataaaagccagtttggctctctcttgagtgcccctcccaccctataatgccatctgccaagttatgacacagcaagaaaaccctcaccagatgtatcccctcaatctgtaacttcccagcctccagaataataagaaataaattatttttattataaattgcccagtctgtggtatagtgtcatagcaacaaaaaactggactaagatggatggctattccccccaaaaaaataactgttgctaaggaggtggagaaattggaatgcttgcacacttttggtagaaatgcaaaatggtgcagccactatggaaagcaatatggtagattctcaaaatatcaaaaatagaactatcttacgtcctagcaattgcatttctgggtatgtatccaaaagaactgaaatcaggatctcaaagagatacctgcacccacattttcattgcagcactattcttaatagccaagatgtgtaaacagtctaagtgttcactgagagataaatggatgaagtaaatgtgttaggtacatgtaatgaaatactatctgaccttgaaaagaaattctgcaacatgtgacagcacagatgaaccttgaggactttatgctgagtgaactaaatcagtcacataaagacaaactctgcatgattctacttataagatatctaaaatagtcaaattcatagaatcaaatagtactaggctggggagagaagaatatgagaagttactcatcatagatgtaaaattttagttaagcaagatgaataagctttagagatcttctgtacctcattatactctcttttgtcccactgaacctgcagccggaatcaccccaaacacagtggcaggggagtttccacaagagagttccccaaactgtcccaagatggggccggttgggattccaaaaagagaactaagtccacagtgatcagtccaaatcatttatcagggcaacttccttacagagtgggctgcagcaattttcgagatgaacagtgagagaaaaggggtgttctacctaggcatgtctacagtgaggggtcaggttatggagtttttatgaaggtttaaggaatttggcacagggtcagggttagttgttttggacaacaatctgaatagctttatctgttcctgggaatgttcaaggccctagcttgggttcaaaccagctgggaaagaccttctgttggccagatgacagagcagtcaagaccctctgatttttggtcagaacacagaaaaatgtgaaggaaactgggggaccctacatactcatagtcaacagtactggattgttcacttcgaaatttgttaacagggtagatctcatgttaaatgttcctaacaccattttttaaaagaaaaaaaaagaccagagagatgattgccatcagttcacatctggcacaagtggtatcactcttcttacctctccttttctctcaggtactcctctctgatggtttataagttgccagtggaagatgtgcaacctttagcccaagctttcttcaaattagagaagggtaagaagtatgactttgaagtacgaccctggaaagaagataatttcaaatcataaaataatcacctttatgacaaaaatgaaatgtgacaaaatgcattacattttaaagttacagtctcaaattgaattttaggaagacccaaaccaaggagatagagggattctctgtgtctgtgccaggggataatgagagtgatttttttcacttttgctttgtggggttttgtcatgtatttttgcatgtatgttggtaaaacctaagtcaaaactcagttatatatgcatttaagaaaactttcttttgaaacatctatgcatacatatttaaaattaaatttttccgtggactggcatattattttactgtcttagcctgtatattaagaaactgactcctgtctggtcattgaaacaatctcctcgcatctgtcacattttagaactaacttccctgcatctgtcatcacaggttcatgttttccttgcaattttagctcattaactctgctactctgaactgtgctagtcagaactctctcgctatactgttttcattgtcactgctcagtgatatatctttgcttgcttatcctctgccctaaggaagagattcagatcttctagttctagaggaattgtctaacttgctagagcatcaggaattgtctgattctctccttgagagcatctgtggtcacagtaatgcatcttcttttcattctctgatgtatgtgagctctccaactttctgggccacgtagtcattcacagcactctccaggttggcattaagcccagtactgacctgaaacttttggtggcatatttccaatctgctgagctcctattagagctctaaccgcctctcccagtctattttggtcaaaagaacagttcctaacccaatcagaggaagctgcaatggtttttggatagaggtccgtgaagatacctgctctctaaaaaggctcacaaatccttctccataatcttctgatacaagccttttcaaaatatgtctgccttccacctgtttctgtgttgaatgtgcaaaacccactggcccacaggcaagaaagaaagcttactcagtagcattttctcctttaaatacagttcgcaaaaactgcacaacatacaagcataattcaagcgctttttctcccaaacctaagtaaatgcattggtgtattcttaactgaacgatgtacttaagacatgaatgaatattaccttaacctatttaagatttttaaaaaatatatcatttgtactatatgctgatttatgagacctctagatatgaaatatatgaactaatacatgttcatccctatgcagttaaacagagctttgacctagaggagtacagcctctcacagtctaccctggagcaggtgggtcatttttagggattcgtatcatccatggtatatgtgtataaaacattccctgggagctgcagaggcagcacggcattgttctcctctctttatttccttcctccctttcaggttttcctggagctctccaaggagcaggagctgggtgattttgaggaggattttgatccctcagtgaagtggaagctcctcccccaggaagagccttaaaaccccaaattctgtgttcctgtttaaacccgtggttttttttaaatacatttatttttatagcagcaatgttctatttttagaaactatattataagtacagaaatggttctccgtgtggtgggaggaggaggttcgggtgctgggtaagtgccatgtcagtgtggacagaggcatttgactaagccaacctcctctcacagcctctgtatctctgcaggccatactggttccattgttctgtataatactgaataaataaatttacttttacatgatcgtataagtttctagataagataaacaaattttgtttaaatttttttaataaaaatcttaaaacactttttttctaacctagactgagaaattcatgtttacttttctaggtgtatgatactttgtaaagttgatactttcctaagaatttaacatgtcatatttttgaaatagatttaagtgtgcttcttattgctaaaaatactaaatgtcatgggtcatagtatctgatatcaatatcgttgataacatatccacaggtaacaccatgatgtaggcataaatggaaaacaaaaaccctactatttcaaatatattgtacttttttatttctgtaagccaactgtgtgccattttcactggacttttaaatctagactttagtgatgtctacattgtaaatgatcttttgtggatatttgtcacttggtttcagaaagttcacaaatgtagcaacagctcacatgactgagtaggtagaaaatgtgaaataaatctcatatatatagttttg

SEQ ID NO: 209 - DNA, 3900 bp, Homo sapiens
agacttcctccttcacttgcctggacgctgcgccacatcccaccggcccttacactgtggtgtccagcagcatccggcttcatggggggacttgaaccctgcagcaggctcctgctcctgcctctcctgctggctgtaagtggtgagttaggggcttccgtggctgcctcccgggtccctgggctcagcttggggcagggcagggagtggggtggaacgagagaaccaaaagtgggtgttgggatgggagcaggtccccaacctcccaaagcctgtgggtttctcccagagcccaagcccccaagttttgtcgtccgctacaagcaggggagaagagacatctaagtgtgttgccacaggacaagttgtgcagaagtaacgcacatagtccggtggcccagacgccagccccctgagtcccgccagacacgctctcccccttgctaacctcttggctgtcaggatccaccttccctggcttctaaacttgcctcccccacccccgtcataactctgtgcctcagtttaccttctttttcctcctcaggtctccgtcctgtccaggcccaggcccagagcggtaggcctagacccagcagtccctctctctacctcccagagacctccctgtctccgtctctcccacaccctttccaaacctccctgccgctgacccccctccccacagttcccagcacacactgacctcccctgacccctgtgctgcagattgcagttgctctacggtgagcccgggcgtgctggcagggatcgtgatgggagacctggtgctgacagtgctcattgccctggccgtgtacttcctgggccggctggtccctcgggggcgaggggctgcggagggtgagtggggctagcaggggacatcctgaggacttgcctagatgggggtggggggctgggtaaactcccagatctcaaacatccaaagggatggtaatggaggtgctgatttggaatgacaaaacaccctcaactcaccactctgcctgtctctgcaccccacaacacccctcacctccagcagcgacccggaaacagcgtatcactgagaccgagtcgccttatcaggtgagaaaaccagactgtcctcctcacatttcactcctgccagggatatctgccccagatactccttcatgccatcagagggacctcaaagccactctgcctaaagcacccccaaaccttgaaggcacatgggacatctgtccaaaactgggccgaatgatcaaccacaagcttatggtcagcttaaaatgtgtgaagaggggctgggcacggtgactcaaacctgtaatcccagcactttgggagacagaggcgggtggatcacttgaggtcaggagttcgagaccaacatggtgaaaccctgtctctactaaaaatacaaaattagctgggcgtggtaacgcatgcctgtaatcccagctacttgggaggctgaggcaggagaatcctttgacccaggaggcggaggttgcagtgagccaagatcacgcaattgcactccagcctgggcaacaagaggaaaactctgtcaaaaaaaaaaaagcgtgaagagttaaaaagaaaaaaaaaagggtggctttgcctttgtaagtgtaaacacaggccttgccagaagtcaggccaggaattttctggaagaaacccagccctaggacgactgatttctgggagacgctctcagtagggcagagaatgtcattcagccctaccttggtaactctaaagagaggagtcctagaatctcttttttgggtttgaggacccttcatccctttgagaaactaagaaaatctagactcccagaaaaatctacacaaaaaatacaaaattgtgcatataatctgagagcagtgtaaatgttctttataattaaaaaaaatttttttttggccaggcatggtggcacacacctgtaatcccagcactttgggaggccaaggtgggtggatcacgaggtcaggagttcaagaccagccaggccaggatggtgaaaccccatctctactaaaaatacaaaaattagctgggcatggtgtcatgcgcctgtaattccagcttctcaggaggctgaggcaagagaatcgcttgaacccagggggcggaggttgcagtgagcctgggcgacagagtgagactccatctcaaaaaaaaaaaaaagacaggggtctcactatgttgccccagctggtctcaaactcccagtctcaagtgatcctcccgcctcagcctccgaaaatcttgggattacaggctcaagcaaccatgctggttgagtattcttgaagctcttttttctttctctactttaatttttttttttttttgagatggagtctcattctgtcacccaggctggagtgcaatggtgtggtctcagctcactgcaacctccacctcccaggttcaagcgattctcttgcctgagcctcccgagtagctggaactacaggtgcatgccaccacacccggctaatttttgtatttttagtagagatggggtttcactatgttggccaggctggtctcaatctcctgacctcgtgatccgcccacctttccctcccaaagtgctgggattagaggtgtgagccaccgcgcccggccttaattttttttttttttttaaagtagagataggttctcactatgttgcccaggctggtctcaaactcctgggctcaagagatcctgttacctcggtctcccaaagtgctgggattataggcatgagtcaccatgcctggctgaagctctttttaaaaactatagagtatacaagagaatctagtcatctatccccctctctgtcaatgttcctttttaaccctttagggggtcatgagattctctaagacctctcccctgaagaatgcacgcccagactagtcatcatatatgattttagggtttctgtctgaggcctgcccctgggggccacatagatcctccccctaccccaagtgtgaacactgctgtgtgaagtctgatatattgtctgcaaccagctttgcctattcacctcacttgtggataaagtttctttgtgaagtctaagaatctcaggtttggctctgtgatatccagaagaccgaggggcccttccagttactggtggcagtgaaattttagggcaaagcattacccggatgtatttattccctctgtggatgtgtctagcacctataagtgctaaatgctggggacacagtgacagagtttatatcctagttaagacaaacttaaagcaaatgaacaaataaaataattttgggaggcacagtaaaggaaataaacaggcttttttttttttttttacagtggctggagtgtggggggaagaaactacagaggggaaattgagaaatgcctctctgaggaggtgacgtgagctgagacttgaagggagaggggatctaggggaacagagttttaggcagaggaaacagcacacgcagggaccctgaggctggggcacactgatgaggcagaggagaagggggaacattgaatgtacttgaataaaatccggatctctttcatggctataaggctgaagaagctgccaggggccttgcaggccactgggagaaggctggattttatttggtgggtcccttccactgatggcccccattcctttaggagctccagggtcagaggtcggatgtctacagcgacctcaacacacagaggccgtattacaaatgagcccgaatcatgacagtcagcaacatgatacctggatccagccattcctgaagcccaccctgcacctcattccaactcctaccgcgatacagacccacagagtgccatccctgagagaccagaccgctccccaatactctcctaaaataaacatgaagc

SEQ ID NO: 210 - DNA, 8959 bp, Homo sapiens
tgcatgttacagatttcactactcccaccagcttggagacaacatgtggttcttgacaactctgctcctttggggtaagttggactcagaggggacagttagaagggtacaggctgtggctgttgtgagtcaagagttttgtcttcctgtggtaactctgggtagaactcatgagtatgaagcaacttgtatctgtgcttccactgtttattagagcttattttatgaaaaggatgggaagggcaaccctgaggtagcattaagcctggacacaccacagtgaagtttccttgataaccacctgtagcttgttcagttctgttagtactggattttgagaaagagaaatagaaactcaagagatctgagttgatccctcagagtctacattaattctgtctccccaattctctcttcctcattattttccttggaccaactgatatctttattctctgatctcttgcagttccagttgatgggcaagtgggtgagtgatctctaactcagcttctccttctatgccactttcctacttccaaaggatgggtcctattaacctgcagaagagcatatagagaaagcagagaaagaagaaagatttataaattatgtaaaatctcccatattcagagcatgattttcataaaaactatgatttgtaggctttctttctaaagttttctgaatgagctctttcctctgagcgaaatgcctgaatgtatatataacagcaggaaagggccagaattgcacaaacactaaagtagtctgctgacactgaagtagtctgctgggtttcccaacatcccctaaaccagtcccctttacaagaaagcagagtgggttttttctcctcagaaagagccaggcaaatactgaaggcttcaaagagaggagtttgaacctccgtttccaatgtacaagctgctgaagccctgcaatgtactctcagagacagtatagctcagaggataaggaaaacagctccgcttggcttgcccaagtctaaaaccctgcttcattgctcccaacagaaaaacctacatcagtaatttaatcctcaggagccccagattcccaacacccagatgaggatttaataacaatgaacagaggtctctgcagcaggaggacactcttaaaggctggcttttgtaggtttccacttgcctatttttcaaataaatctaaatatgtatttttcccttgtgctatccacaaaagcctcaccagttgctcagagccctcccctttactccacttgatctttttctttttcttcttgtaatctccaagtagacaccacaaaggcagtgatcactttgcagcctccatgggtcagcgtgttccaagaggaaaccgtaaccttgcactgtgaggtgctccatctgcctgggagcagctccacacagtggtttctcaatggcacagccactcagacctcgacccccagctacagaatcacctctgccagtgtcaatgacagtggtgaatacaggtgccagagaggtctctcagggcgaagtgaccccatacagctggaaatccacagaggtaattatgacttggaccaggagggccggaaactacaaggtcttcctctgcgttctctcctttctggatgccagatgtgtgtgtgtgtcgatttatctgggtgcaggtctcagcactatgtacctaccaggtgaaactaaatcagtatactcaaaacatcacagcagggtccttaaactgtgtaccaacagtacctcagctgggccagctctaagtaggatgtctagagtaagacttcggccctaagattgtatcattattccaaatgtatgcctgtacatagtaaataataataattcaaacaaatgagcaataataaataatgaaatatcttcctcccacccaaaaccctagatctgcagtcaccttccacagaaacaaaactgctaatatatatatacatattatgcatatatatgtatatattagcattattatatataaactatatatatatacacacacatatatatagttttaaagctgtgggtggtagaacactttctaagtattgtcctatatcttacttttatcacttaaaataccttgaagttctgtttatattaatagaaatccactttaaaatgtctgctgcacagctgtaccagaattaatttaaccattctgcctattggcaaatttgtaagatgtttccactcttttgattttacaagcattgctgcaataattatctttatacatacattccgggggcacatttcatagggtatctgtaagataatattctggacatggaattattgtcatattttaataaatggaagcagaaaagcccaccacccacttaaacctgtaaggagtttctattcatcaagagatggagactgcaatattcttcagggaaaaatgcttcattcaatatgcaagacaaaataaccaaatgtattatttagttattcagaagtgatgagtttaaacttctttaaaaatgataatgcaaaagttaatccacactggaggcaaaattgcctttatgcagacatggttgctgttagaggaaatgtgttttagccaaggaaatgttgagaatgtctgagggaaggcttgatgttcctcatgtgtcccttaggtctctgtaaataagttcttaggatggagaggttagggaagctgacagagctgtttccttttttttgagacagagtctcactccgttgcccaggctggaatgcagtggtgcgatcttggctcactgcaacctctgacagagctgtttcaacaagacactttgggtaattcaagcagaagtgtttcatggttcaagtgacaacaaaaggactagggctgggaagagtccattttctttacctctacacagactctaggacactcagcatcagtgacttactgagaatcatatcttttttacattacattttaatgtgaattttcattgaaatataacttatgtacaataagccataaatgtacgccacagtaaattttttcaaagtaaacagcatccagatctattttagacatttccagcacctcagaaactccttcttgcccatttctagtccacccctgacactgacttccagcaccataggttttttgcctgtttttgaacttcatataaagggctacggtatgggacaggatgtactcttttgtgtctggtttatttttctcaacattatgattgtgaactgtatacatgttgtaaattgaagttcatttgttcttattactgtatatttcatattttcccattctgctgaggggctcgggttgcttctggttttgaccacttacaaatagtaatgctgtggatatttttgtttacatgtttcaaatattttctaccattactaatgttcaacagtatctgatggaggtatgttacaatttcccactcttttggatatacaaatgcaaattaagcatttccctaatgactatgatattgaccatttttcacatttattacctatttgggtatccttttttgtaaggtctttttgataatttttctattgtctgtctttttcttactgacttataggagttatttatatattctggatataagtcctttttcaagagtcttaaatatcttctcccactctgtggcttttcttttcactataatattaaagttttgtttgttttcaatgaacaagacttgttaattttactacagtacaatacaccaacatttttggttggtgctgtctatgccctattttaaaatgtttcgccacagtcagccatggggaattcaattgcagctcactgactcttagtcatttcaatttaatcagtatatgctaagaccaagaaaatgcagctggttggtggacccgagccctaatcatatggctgacaccaaagtcatgaaggtaggggaatgattgttgagtaggaaattagtaatgtctgctaaaagctgcatctcttgagttttgatatataatactaccattaccacttaagtttaaaaactcataaatttccattatacattattttattcatgaattacttagatgttttttggagggtagttttttgttattgatttctaatgttatagcactttggttagaatttgtgttaaacatggtatcagttcattagtatttgttgaaaattgctttgtggtctagttcacacttaatttttctaatattgcatgtgtgtttgaaaagcatatgaattttctttctaaagtagagcatccacaaaatcaagcctattaattgtgtcattcagatattttctaccattactagtgtttgacagtttctgatggagatgtgacagcatttcccactcttttggatatataaagcaaagatggcagtgtttgggcagtgcagtctttcagcatctgctggctgtgggtgggaataagggagggaagagaattaattctatttggaagcattatatcagtatccatgactgtaaaattcatgctatgtatagcatagaaacacctgtcttccattcttagataagttctggaggggaaaaaggcactattgtctcttttccgccttagtctcctaagaaccccatttttacttagccaaaccaactgcctctggagaaaagaaaagtagttgaagcatttttggttatgtgtagaggtgtttgtcgaaaggaaaaacccattgacttggagcttgttttgctagtgatatcattgatcttacatatgtgagtattcatatcaatgtagtaggatgtttatatctggatgtttgcccttctgtgtgtttgtctcaggatgcgtggtcctattaacaaatttgtcaagagttggagtgtatttgttttctattgctgtgtaacaaatttagcaacaacatacatttaagatcttccagtttccatgggtcaggactcccatcacagcttagctgagtgctctgctgagagtcttccaaggctgcagttagggtgttgactttgctgtgtttctttttgcagctcttccaggctcacaaggtcactggcagaattcagttctttgtggttgtaggactgaggttcctgctttcttgctgcccatcagtggggggccactctcagctcctagaggcccttgccttgtggcactcttgcaggccctctcctggcgtggcagcttacctcttcaagttcaggaggagactttccatccagactgctaagatagagtcttacataatgtagcaatcccaagagtgacatttcatcacccttgtcatattctgttggctagaagcaagtcataggttccacccacactcaaggggattatgcaagggagtgagtcattgggatcattttagaattctgcctaccatgctgtatgaactgtttttgtttcaaccaacttctgagatctggaaagggaagataagaaagggctgtgtatgcagttgccagtaaagattgcttttctttccaccaaagctaaagatatttgaggaaccggatataggcctgagatttagcagagctctgaggctggatgttgcaaggagaaaaaataggaagcccacagggccaagcttgggcctccttgtacctcctccactgtatacatacattttgggttcatatttttcaggctggctactactgcaggtctccagcagagtcttcatggaaggagaacctctggccttgaggtgtcatgcgtggaaggataagctggtgtacaatgtgctttactatcgaaatggcaaagcctttaagtttttccactggaattctaacctcaccattctgaaaaccaacataagtcacaatggcacctaccattgctcaggcatgggaaagcatcgctacacatcagcaggaatatcacaatacactgtgaaaggtattgtattggaatagtcatagaactgatagtccctccccctgagggaccatcataaatattctaaactcctcactttaatttacaagtgaagaaactgggctccagagaggtaaactgcattactaaaggccacaccatgaccagtagctggaaccagaactgaggtctctgggtcctagtccaatactctttccagtgtaccgcaacccccatcaataatcacaggagctaatgtcaatgtcagggcataatggtgatccatttcatccatcattattttagttgtaaagaatacagactcactctaggtagataggagagttagaaaataataccatggaatctcatggaagccccatagaaagagaaacctggaaaacatgaggaacgggctatactgtccatctacctctcagggacaaagcagcctctgtggtgccacttcttcctgagcatctgcaggctaagcagtttgcatatggccttgttctgaccctttcacggcctttcctcttaatacaatcactagcaacctttctctgtctgagaaaaaaaaagttcactcctgtgggaaagaaattattgtcccagattatcttttaaagtcaggaacaaaaataatgagtcactgaaatgtggcgggcacctgtagtcccagctactcgggaggctgaggcaggagaatagcatgaacccgggaagcggagcttgcagtgagccgagatagcgccactgcactccagcctgggcaacagagcgagactacgtctcaaataataataataataatgataataaagtcactgaaatggcaagtgtgtgagtcagggttcactcctagttgaccactgccaaaagggcatggttattgaccagatgacacggtcattcagggaaggatggaccatgtagggcaggggttcccaacccttactggtccgtggcctgttaggaactgggctgcacagcaggaggtgagcttcttcatgagccagcattacggcctgagctcctcctcctgtccaatcagtggtgacattagattctcatagaaacatgaatcctactgtgaattgtgcgtgcctgatgatctgaggtggaacagttaccttccaaaaccgtccccacttcaccccccggctgtggaaaagttgccttccacaaaatccatccctagtgccaaaaaggttggggaccactggtatagaggtatcctcagtaggactcagcaagctggcaaccctaattatgtctattaggacaccccaagaatggctctctgctggaagtaaaaagggttaatgccttatggattcattttctagggccaggtttcccaagggggtaaagggcatgtcttttgtgaaaaggacctggatgctaaacaggcaaccctgtcccccatcaactttctccttagagctatttccagctccagtgctgaatgcatctgtgacatccccactcctggaggggaatctggtcaccctgagctgtgaaacaaagttgctcttgcagaggcctggtttgtagctttacttctccttctacatgggcagcaagaccctgcgaggcaggaacacatcctctgaataccaaatactaactgctagaagagaagactctgggttatactggtgcgaggctgccacagaggatggaaatgtccttaagcacagccctgagttggagcttcaagtgcttggtgagaatgacgggaagccactggcacagaagaagggactcccttatctcccatgggactgaggtttgttcaagggtttttggcccagacaagaggggaaagtctcttcaggaaaagcccacaagcaggcctttccatccttgattcacaacatcactcttctcctcgcaaactgttaaatttcctttcctttctttttctttttcctttgcctttccttcctctatttctttccttcctccatttctttccttcattttctcctctgtccttcttttcttctccttcattttattttcccctccctcccactcttccctccactccatgacccctccttctctctctctctctctccctgcttccctgcctccctcctcctcaccaacaatctcaccaacaatttatcaagttcttcctatctgttgtcatacgtctggggatataaagacatttgagtatagttcttgcttcaaggagctcacaaggtggatttatcagacagtgattttgtaaactgcaaatcaccacctccccaagtatctctgtttaactgaggcagagggattgtgagctctagaacaaagtctccttgggggggaaaaaagttcatcttcaacccaaattcatttcaagtattaaatggcacagagatatcagttgtctctggaactagggagtaagtccactgacagggcccagcaattaagctcttccaaggagcctgtccctgtctatacaccatatagccagttagagctaccgccagttccttcctgctccctgaaatgaccagtgcctccctaaggacaggcacatcaggtctcagccaaccttcccttccaaacataactcagccagacccctctggtctctaaatagtatctcttctctttgtctttttctgtttcaggcctccagttaccaactcctgtctggtttcatgtccttttctatctggcagtgggaataatgtttttagtgaacactgttctctgggtgacaatacgtaaagaactgaaaagaaagaaaaagtggaatttagaaatctctttggattctggtcatgagaagaaggtaatttccagccttcaagaagacagacatttagaagaagagctgaaatgtcaggaacaaaaagaagaacagctgcaggaaggggtgcaccggaaggagccccagggggccacgtagcagcggctcagttggtggccatcgatctggaccgtcccctgcccacttgctccccgtgagcactgcgtacaaacatccaaaagttcaacaacaccagaactgtgtgtctcatggtatataactcttaaagcaaataaatgaactgacttcaactggga

SEQ ID NO: 211 - DNA, 35043 bp, Homo sapiens
acactccacccctactcgccctctctctctctgcttctttccttttctctctcatggtagggttatgagtcagttgccaaaaggtggggacatttcctgatgcatttgcaacactgagaagttatcttaagggaggctgggccccattctactcatctggcccagaaagtgaacaccttgggggccactaaggcagccctgctaggggagacgctccaacctgtcttctctctgtctcctggcagctctcttggcctcctagtttctacctaatcatgtccctggtggaggccatcagcctctggaatgaaggggtgctggcagcggacaagaaggactggaagggagccctggatgccttcagtgccgtccaggacccccactcccggatttgcttcaacattggctgcatgtacactatcctgaagaacatgactgaagcagagaaggtgagtggaggtgcctctttccgggcctcctctgtgcatttgttattatgattctcaaccccattgcatttcggaaacctaacctctggggagattgaaaagaacaaaagttgcccaagctccacccctagacagcctgatttaactggtctgggaggggccccaggcagccagttttaaaagctctccaggtggagagcaggtgaggggcagccagggttgcctctttctccatcttctaaattaaaatcattctacaagtgtctttaacacctttgtgaaggctgtcctagtcgtactttcttctacacagaactccttctgggcacagaatctctatctatcccagcgctttacacctgattattgattctaaggcacctcttttggctttccaagactttcatgtgtgtcgactttgcctgctcaagagatttaagggaggcacttacaaaaaatagcttttatcccaagtgacaattctgatcaattataaaggagactcttttaaagatgctgaggctggcaagaggaaattgtactgtgattgactagtgatgtctgctgggggcatggtgtgggatgtctcgcatctttttcgttatgttttctcactcaaataccatagtatggagttaagcattctcgataattatttttttgattggttgtggtaaggtggaaagggtatggagtttggaaggagaagatctaggatcgaatcctagcctctgtctctctctggacttttagtcttaagcaagctatgtagcctatgtagacatctggctttcagcttcctgagtttctaaatatcatgaaaattaagtgagatgccaaactattaatgtctcgtggaacttcacaccactgtataagagttagttattatttttaccgattactgccagtctttgcaaggtgtggcagtggttgactccccaggtcccttaaagaatcagtcccttccacactccaacagtaggtaaacaagcctcagccacaccctcctgacaggaagacagagaagtgactgaaatgttctcacatagcttgacaagtcaatctcaggctctaaggcagagcatggcaggaccccccacctctggctggaggaaggacatggccccacctcctctcaggggcctgctgaggggctgagtgaacagcaccacacattctgagggctgatggacacaaagtgcacattgtccaggagaagagattggcagctagtctgggcacagctatgccagcagggactgtagcctcctgccttggcctggatatgggatccttggcaaggttgtgtgggccaccactcacttctcagctcccaggccttcaggcccacatgtctctgtttctcctggcattcctctgcttctagccttctcattccttctgcctttctttgttttcctgcttgagcccttcctactagcatttatatgcattcttattcattatcattttaattgtatactattcatgtataagtttgtatagtaaacaaatataacaatttatataatattttaattattttcatttgcaataaattttattatttatttaaactgaatgttcaatacattcataggaatacaagaaatgcaacaagggttaaaatttcattattacattagatatcattttttctttctttttttttttttttgagatggagtctcactctgtcacccaggctggagtgcagtggtgcaatctcggctcactgcaacctctgcctcctgggttcaagtgattctcctgcctcagcctcccaagtagctgggattacaggcatgcaccaccaagcccgtctaatgatgtttcatttttcaaagaagcttctcctatttccctatcttttttatcttccacagagcaataaatagtaattactactctcctggacaaggtgctctgttgtgttggataggaattgtatctttaagtttgacatcattatcacctccaaaaactctaccttcacttcatagcacagtctcgctgcattgtttcacagtaaaattgtactctactcaaactaggagaactcaaagaaattagagcaaacagcagttaaattcatatgaatgaaagacagaagaccaaagattttaaagtactgatttagtaacatagtgtctactggctcaaagcttctatctaatcatattaaatcatattattaaaacagcgataatagaaatgaaagctacactaatgaaaaaggaacttgggaatgaggtcattaaatataactaactatattttaaatatagatatgtattttttattagtatcaggtaaatgtctaaattatctattctgaattctagtctcagagaaggtcagagacagttacaaagaaggcgcttcatattgtcaagtccatttttaaaatgatgagctcctttgggaaaatgctttagtgtttcttttcttctaagatttctgttggtgataatccattagtgtctgcacccttatagtccactttgtctttatttgtatcattggattttttttttttttttttttttttttttttgagacagggtgccttactttgttgcccaggctggagtgcagtggtgccgtcacagctcacggcagtctccacctcctgggcttgagcgattgacctacctcagtcccccaagtagctgggaccacaggcatgtgccaccacatctgactaatttttaaatttttcgtagagatggagtctcactattttgcccaggttggtcttgaactcctgggctcaagtgatccacctgccttggcctcccaaagtgctgggattacaggtgtgagcaaccgcacctgggaattattggattcttgtgtagcttttctaggccatatatgactaacaaaagcagaaatcagatggtatatgtatggctccaggaatgttttgtagatccacagcagaactggaatgacaatacaaggaatgcacaccattgtcccagacttcagcttctaaatgtgagagcgaagtggggtgcaccgtgagagcacagggtgggcctcgaggtgccgacgagggcagacagcagagctgggcaccacagggagctagggctctgtgagccgtggctcatctcacacctcctcactgccttgcatcatggccatgtctggacccttctctcctcaggcctttaccagaagcattaaccgagacaagcacttggcagtggcttacttccaacgagggatgctctactaccagacagagaagtaagtggttcaatgttgcaccaactggaggatttcagagagaaacccaaggggtctcagtgttgcgggcttggtgtttgagcagtaccttcccaacctctgttgggaaatgtgactggcccttctggggacagttatgcaataaatcagcaggtgaggcagaagctctcactggggaggcaaggcaggtctgccaccagattataaatcagctgtgtcataggcacaatgagcctaggtaaccaccatgggcctgatactcagctggtgtgacaccccaccagtgtccctgatggggtcacccatgtaggtctcctatgaggtactgagctgtcacagaatggggatgatcatgaaactgcatcaaaacctggcttcatcccagcaaaatgcatttccaaaacctggtttaatccatttgaggaaatatacttcagctgcaaaaatgataatacaaattaacattatatgtataagaataaattactacagataagtaagtagcgtatgcacttatacagaaaaagtttgcagtagatgttaattttttttctttttccgagacagagtttcactcttgttgcccaggctggagtgcaagggctcgatctcagctcaccgcagcctccgcctcccaggctcaagcgattctcctggcttaccctcccgagtagctgggactacaggcatgcgccaccacacccagctaattttgtatttttagtagagatggggtttctccatgttggtcaggctggtcttgaactcccgacctcaggtgatctgcccacctcagccccccaaagtgctgggattacaggcatgtgccaccacgcccagccagatgttaaatttaaaaacagatttcaaaacagttcatatagcatagtcccatttctgtatcacagaataaagtctggaaggccatagatcaaaatgttatcaataattctctctggatggtgggattataggaaaatccattttcttctatcaccctgtctgcatttttaggtttgtttatagtcaacatggaataattagtacaaagattaataaattcaaaatgaaagttaatctcaattcctcctccctctcatcctgcacaaatacctcataacaaataacaaaggaaaaaaattctaagtgataatttcaaatgttttggggcatgggaaactgaccctttgtagaaactgttccaccagtgtgcatcagttctagggaagaggaatttggctcaggctaatgaagaattttttttttttttgagacggagtttcgccctgtcacccaggctggagtgcagtggcgcgatctcggctcactgcaacctctgccttccacgttcaaacaattctcttgcctcagcctcccaagtagctgggattacaggtgcccgccactacgtccagctaatttgtgtatttttcagtagagacagggtttcaccatgttggccacgctggtctcgaactcctgaccttgtgatccacccgcctcggcctcccaaagtactgggattacaggcatgagtcactgagcccagcctaataaagaactttctgacagtgaaaatgatctgtgcatggtgtgggtggggtgagggtgaggccgggcgtggatggagcagcagggaggttgtagacaatgtccagacatcagagagagggctgggctctgatcctgtgccaccctgaaaggctttgatcctatggtttggtcagaaacagagcctgtaaaacccatgtatgcagctgttgctaagggcaaccacaagatgctcaaaggaccttaaagatgtagatgcagttagttacctgaagaagtgaaagtagaagtgaagtcttttctaaaagaaaaaccacagacacaatggcaatctggggagaaagagagcctgggattgggagaagatatccaggcatttagctctctcttccccccatatttagtgtgacatatttattgtgactttataaattctttttttaattttaattttttattttaatgtttgtgggtatgcagtaggtgtatatatttatgggacacatgagatattttggtacagcaggtgtttatcttgaccgacgtcttgcctctaactgcctgtccccgctcttaacatccttctctttctcactcccccttaccccgtctccagactatagaatatgcagggaggcctaacaacaaatccttcagccgatcttaaatctcaaaacgcaaactctaaggtcattccttagtgacctctaatagtctataaagaagagatacaactggcaaaagagtgaaggctcccagaaagaatttcctccaaaaaatgcccgtgagtcccaggatctggaaggccacggttttgagtgattagaaagatcttggaaacttctaaaagtaagacccaggattcaattaatctgtgattggtaatattaatagttacacctgagagaaaaatctaccgagttttatctgtaattcaacaatgaggaaattatacaaatgaggcactaatctcaacctcaagcaggccctcttgcgcaattccctaggtgttggtattccctttgaagttctgttcttgacccttttcccttttacaactgcagcagtggttgttaaatggcaaaatgtgtttccagaaatacactttcaagcacacacattcgtttatgtacaattcaggggctatagatatgaagtccgtatgtgaaccttgaggatccattcctgggcaaggccaccctctcccatatggctggcctccatttctcacagaatctgtacctgagatccatccagggaatgtctctttccctaaacctcatcaggttgacctcttaaatatttcttaaatccacctatttctctccatccccactagcactgccttggttgagaccctcatttttcaccaggactactgcagtcacttccaaactgattttccagccactgctcttgtcccctccattcatattccagagtgatcttgtaaaataaaaaaaaatttaaaaaaagcaatctctgtgagaacttccagtggcttccatgactgcaagataaaggccaaattcccttgcctgttcctatgtggtccagctgctgccacccactcatgcatcctccgtgcctttgccccagccatgcccaaccactaaggcagcgtctgctccctcttttgagcctccttttgtaatatgtctggcccgtgacagatatttgcttcctgtatatatttgtcttctccactactctacgaatttcgtaagaaatctttacttactcatgcttgtatttcagtatctagcatagtagttactcaataaatgagtgttggattaaataaaagtgagcaaaatatagtctccgtttcaaggaacttataaattaaaaaggggaaacaagtcaagaacaccagtaactgtaatgcaaggcagaagtgggtaactgctgtaagaggtagttttaagtaagcgggatgggggctagagaaattacttcttaatgtgtgggacagaaattccctcagattggctgggcacagtggctcacacctgtaatcccagcactttaggaggccaaggtaggcggatcacctgaggtcaagagtttgaaaccagcctggccaacatggcgaaaccttgtctctactaaaaatacaaaaaattagcagcacatggtggtgggtgcctgtaatcccagctacttgggacgctgaggcaggagaatagcttggacctgggaggcagatgttgcagtgaaccgagataacaccactgcactccaacctgggcaacagagcaagattctgtctgaataaaaaaaaaaggaattccctcagattacaaaagggaattgtttaaggctgataatgttatggatggaggtttttccccctctatttccctctattttccccactttcgtatgtttttgtgttgctcttccgtcattataaagttccaacagaacaaagttagagcacatttctgaaaaggcaagcagagtctcagggataacagccaagctgtctcgcctctctagccccagcgttgtcatctgaaaggcacaggggctcgaagctgtctttcagatcctgtgccttatgaatcttagggcatgacaataagggtgagacccattccatggagctggcttaaagaggctccatagcaaagccttcttcctgctgacttggaaacaggaaagggagtgggcccaaacctctgtcacagcagccactgcagcatcccaaagatgcctgaagttttgacttctttcagcttgctgagattccattgtcctgggtgcaggtgtatgagctgtggactctggacgcatggggcactggcagcatgggaacaagcaggttactaagaaacctcccaggagtattacagaaatggggattataaactctctcaagcctggagcttgtgaaaagctatggcaaggttgctgcttcagctggtggatcccctgcctgggaggggaggggctttgggtccagtgcagccaaggcgccccaaggggtgtcactgaagtgtgggtgtgaagaaagcacccatgcccagcccagcagagccctgcaggaagctgccagcaccttggctgcctcctgggggatgcttccaaatggccacgaagagaaccgctgaagaagggctagagggaggcgggggctgccgcagcacggcccactggcacacagcgctgaatgctattttgggattctcatactgagattattgcgaacctgtgtaatgggaaaagagctgtgtgtcaaagcggaacccccttcagggctgcagctctgggtaaacaagtggagaggccgaaaagaggcctgcagcagggaacgagggggctgggaagcaggccggtgctttcagagacatgtttaaaaacgacacttagttggcgaggcgaggtggctcacgcctgtaatcccagcactttgggaggccgaggcgggcggatcacgaggtaaggagatcgagaccatcctggctaacacggtgaaaccctggctctactaaaaacacaaaaaattagccgggcgcggtggcggacgcctgtagtcccagctactcgggaggctgaggcaggagaatggcgtgaaccgggaggcggagcttccagtgagccgagatcgcgccactgcactccagccagggcaacagagcgagactctgtctcaaaaaaaaaaaacacttagcaaggatgccccttccccgttttaaaaattaattaattaggccctgtgcagtggctcacagttgcagtctttgtactttgggaggctgaggtgggaggattgcttgaacccaggagttcgagaccagcctgagcaacatagtgagacccccgtctctataacaaaattaataaataaaataagtaatctttttttttttagagaaggggtctcactatattgtccaggctggcctcaaactcctgggctcaagtgatcctcctgccccagcctctggcggagtagctggaactgcaggctcaaacctcagcccctggccccaccctgtttttttggttgttggactttcttttctttctttctttctttcttttttttttttttttgagtcaggatttcattctgtcgtccaggctggagtggagtggtgcaatcatgtctcactgcagtcttgacttcctgggctcaggtgattctccaacctcagcttcccgggtagctgggactacaggcacgtaccactatgcctggctaattttttgtacttttagtagaggtggggtttctccatattgcctaggcgggtccaccctgtctttaaaacaaagcaaaccctctgaataatttgtcagttctttctctctctctcctaccaggcccaaatctgtagacaccttttttttttttttgagttggagtctcgctctgtcaaccaggctggagtgcagtggcatggttttggctcatttcaacctccacctcctgggttcaagtgattctcctgcctcaccctcctgagtagctggaactataggcacgcaccaccacgcccggctaatttttaaatatttttagtagagacggggtttcaccatgttggccaggctggtctcgaacccctgacctcaagtgatccgcctgccttggcctcccaaaatgctgggattaccggcacgagccactgcaccgggcctctgtagacatcttgatgggctagggaattattaggaggattttgctgggctcatgcaatgccagatagacccaggtggtgtcacttcccagctgaaatccatctgcttagccaactcagcagggaggaaggcacgttggtaggttgatgctgacggcagttaaagtgtgtgccctctgagaccttcagcgagctcccaaacaggcaatagaacacagtggaaattgcagctgccaggaaacaggaaacctctgcttctgcctgtcctcttcgcgatggaagaggctcagtgaattgaagctagttaccccaccttctggcttagaaagcggaacctgatttctggcgtacttctgggtaccttcttcctctttccaggaacccagaaagatgcgtggaaaagacatgaaaggccccattgctacttaaagaatggcctgcatgcatttagtaggttttacaaccatctttattaacagggatactagagaaagccatcctcctatttcaaacccaagctctcttcttttatttcccgcatagccactgctaccatgtgtgacttacctcaaccctaatggtgatggcttctcccccagccacactggcacccgttccttatgactctcttggccaaccagcccttgtgctcagctctaaacttccatgagatcagagttccagcttctatgccatgtatttttaaaatatcctgataatagcttatatggcacggagctttaagtaaacacgtaataagtggctgatgtatggattaattggtagagtgttagagctaaagaaaataaaacaacaaaaacaatagtaaaaaaattatggtgtgtgccaggcactgtctgaagtacccaaatgcttcatctcctttagttctcacaatgaacctgtgaggtatatgctgttattattctcttttttttttttttttttttttttttgagacagagtctcactctgtcacccaggctggagtgcagtggtgtgatctctgctcactgcaagctctgcctcctgggttcatgccattctcctgcctcagcctcctgagtagctgggactacaggcgcccaccaccatgcccagctaatttttatttttttatttttttatttttagtagagatggggtttcaccattttagccaggatggtctcgatctcctgacctcgtgatccacccgcctcggtctcccaaagtgctgggatttcaggcgtgagccactgcgcccggccttattattctcttattctaaagatggggaaacagacttagggaagctaggtaacttgccgtttctcaccagatagtaagtgacggagccaagactcaaaccaggtggttttgactccagaagtgggatccatatgctggcaagctccctatatgatacattctttgcatataatatgtccctgtatacaatatgctgccataatattggtgtggaacttcaggccaggaaagtgacttgctagggtcccccagttagtggcagagctgttggatctggactctggctcctggcccctttactacatcacactgcctcttgaggattcctgccagcctgtgtccacattccaggcttatctccaagagaagccgggttggtagctctgggtcagatggtggcctagggacttacagacttacagtccagttgcccaggtgtgagccacaaccaggcagccaaatttgttcctgccaggtcaggggactgagtggagtgaggctggcgtagcttatgcctgctgctcccaccccctatagcccagcaatggctccctcccaccagggcctctgtggagcccatggtcaaggcctgggccagcatcctcagaagtgtgtgtccaggtcccacctacatgcctgtgggccctattgatgtggtcagctcccattctctgctacaagtcccaggacagcagccctggtatacatcgagccagtcagctccacgccaatccagcagcacaaggcagtgggagcagcattagaaaaactatctggggctgggcatggtggctcatgcctgtaattccagaacttttgggaggccaaggcgggcagatcagtcgaggtcaggagtttgagaccagcctggccaacatggtgaaacctggtctctacttaaaatataaaaaattagccgggcgtggtggcgctcgcccgtagtcccagctcagtcccactcaggtggctgaggcaggagaatcacttgaacctgggaggtggagcttgcagcgagctgaaatcccaccactgcactccagcctgggcaatacagtgagaccctgtctcaaaaaaaaagaaaaaaaaaaggaggaaatactatatagcataagtggttgtttttttttcttttccaaagtgtagggaggaggcagaagtggcgggcggtgaggaaacaaagaagaccacaaaaccaagctctaagttgaactcaaaagaagccatgggcgaaggcagtgggcaggagggtgatggtggcagctataagaaggggcccctccaagctgtgccaggctggcctggcctgatggtgggagccaggagtgagcagtattccaaatcagctctgaacactctgcagggacacaggcagggggcaggtgctggctctgcttggagctctcaagagagaatgagagctgcatcggaaagcgacaagtcaggttgtcagaaaggtgacagttgtatgcagtcaatagagaagaaactccctgtgactgtccaagacgaggcactcagggttgctttgaggcacagccctggggggaacaccattcccaaggagttgtatagaatacttggactcagggttgctgaaaactagaacaggtcaaaaggaactgaaaggcttcttgtcccagtgaaatagatggggaagggagaagcagactcacattttatgctgcatttatttctccatccactagactgctgtattttctccctctgtcctgcagatatgatttggctatcaaagaccttaaagaagccttgattcagcttcgagggaaccagctgatagactataagatcctggggctccagttcaagctgtttgcctgtgaggtaaggagaacagggcctggcctgggcaggaggggatcatggctggatggatggctgacagttcagatgcacagtgatctgttgacacctccaggagcttggaaaagccattttgcctcctctgccttgagactcagattttccttgaagaaaagactgagatggattatttcaggctcatcaaggcattgtcatcagttacctgggggcatacattttattaatgtgaagcgcaaaggaccatgcaaaaatgagccccccgggctctctgaagggaggctggacacgagtgtgttggcttgtggaaatattcatgataatttgcatgttttgattggcacttcagattgacaagctatttgttcagcattttgctagcaaatccaaaatcatgagttcattgtccgtgcaggacctgccagaagcttgctcagttcccaagtttatagaccacactctttactatccatggttcttaccccatgtacttgattgatacctaaagagagactgaggataatttggcataaatctgtcccctcttgctcaaagaacagctcaaggcacatatttaggtaaaggtttctgcaaaacaacttcttttctctattatcaaaagggagagacatgactggctttgactttgcaggttcatttactttttccggttggcccttcccacccctcccacttccaaatatatactagcagttttgaaaaccaaaattcctgtaaatgtcaaagacctttctttagaaaaatcactgacaaaagtccccttgctttagtttctcaggcacaagaagtcaagtgttcccagggtcgctcagggctaataatagagtctgtagccgccctcggcccctggggacatatggccccatcccaaccctgcagcaggctagcaactaacttcacgtctcacagtctgagaagatggggctttgcagttggaattggctgccattcgaccaacttctcgagtaaggtttctcagctgtagctctgttaatatgttggaccagacaatcttgtattgtagcagaggcgagagaggggttgtggtgcgtcctgcgcatcgtgggaactttgacggcatctctagcttttagatgctactagcactgccaccaccactccccacccaatgtgacaacctaaaatccctccagacattgctaataagccaatgacagccacttatacagattagaaagttgggggacaagtggctctagaaaaaggattatgtcacagcagcatcaaagtacagttccatgggaggaatgtttcccctggagttggggttaaaatggccctgagaggacagaaaatactggctgagtggccctctctgcaagtaaagctgaacttttcagggtctaaggccctctttgtcacatgggaccttccagtcatttccctacttataatccttctcttcctgatgtggtatgaccctggcttctgagaatcacatcattatttttgaagagtgtcaaggtttttctcatcattagttcataaaaactgattgtagagaaatgtcttaagagaaggtggctgagaaccaaataggaaattttaaacgatctgagttctttctttctgcacacaaggtcaggagtgggctggagaagccaacgaattcagaaggcagtagctcattgaatctcagaaataggactgaaaggagtccagatttccacttccggggttgatcctggcccccaccattcagcaccagccactaatgccacagaaacatcaatccttccacctgtctgagtttggcaagttcacgtcattgttggcaggaggcctcagttcttcgctacatgaacttctctctagggctgcctaagtcttgtcatgacatggcagctggcgtctctgagagcaagtgacccaagagcaagacagtgtcaatgtcttttataatctagcctcaaatgtcacaccccctaatttccataatatcctatttaaaaaatttatttcagtcgggccattttttagatcttggtaatgcatccaaacgattatttgattctgtgtgtaaattgtgaagcacaatagtaaaatagacactcaagaaccacagcccaactcaagacctggaaaagtatgacactgttgcatttaccattccccccccacctgaggtgaaggtgcccctggcttctgtgctaacctctgtcttctgggttcaagcaattctcctgcttcagcctccaagtagctgagattacaggtgcctgccaccatgcccagctaatttttgtatttttagtagagacagggtttctccatgttggccaggctgatctcaaactcctgacctcaagtgattcacccgccttggcctcccaaagtgctgggattacaggcatgagccactgcgcctggcctgtgttgctacattagtcttgttactcacatggtctgggccaggttctgctggtgctggtacaggaggttgcatcttgatccatcttccggctctgtacctgtccagtgtttcagcctaggtacagtggcaggaggtggactggaagaccacacacctgtattttattcccaaccctgtgtctgcctctagaaggggccttgagcaagtcactcttttactaaagcaactcatactaaaacaacacaacaattcttcttcttttttttaacctggtttgaacacactgtatacaataattcttgtcccttcctgacctatttcgttgttggaagagtacaaatgatgttgcatttacgcattccatggtgttttcttaacaccatgtttgtgtttgacataactcaatagcaagactaattgcactatattttagatattcccaggagagctgagaaagggagaaaggctaccaggcaacattctcagagtatacgtgtgagcctttccctggcaccttgatttggagtagtctcaagttttatgttgcggtctgtacttttctaggtgttatataacattgctttcatgtatgccaagaaggaggaatggaaaaaagctgaagaacagttagcattggccacgagcatgaagtctgagcccagacattccaaaatcgacaaggcgatggagtgtgtctgggtaagcgtattggtgatgcaggtgttgagaggatgtcactggattctcatttgtctcagaggacatgccattgagaagccataaaagtggtgcttttactttctgtgagtctgggtaacactgatcttagggtatagttccacttaagatcttgaatctgtgctgagaagctgaggcctagagtatgggatggcagagccctggcatcacaccacccttggagtggggctccttggcaatgcaggagaacaggatattggatgctggagcagtgctgcacagactctaagcactgagagggcagagtccatgtctgcttgatcaccactgagtcctcacagcctggcacagtgctaggcacataacagctctcagcaaaaatgttttgttttgttttgagatggagtctcgctctgttgcccagcctggagtgcagtggtgtgatctcagctcactgcagcctctgcctcctgggttcaagcaattctgctgcctcagccgcccaagtagctgggattacaggtgcatgccaccatgcctggctaatttttgtatttttaatagagacggggttttgccatgttggccaggcaggtctcgaactgctgacctcaggtgatctgccctccttggcctcccaaagtgcagggattacaggcatgagccaccgcacctgcctaaaatatgttttgattttgtgaatgagtgataaaaactatttatcgttcaagcatatttgtgaataaggctagctttaaatctgatttttaaaacacagagaagaggactcaagccagtctttatatgtctatcctcatcagcaaacacccatccaagggagcactgtcatgagccttgcttgatcccgggccagccttgtcgtggtggtgccctctacaccatgagagaaccccacggacagcacacagagtgggagaggagcagttcctctgggaaaagagggtgctgaatagcaacaaatagcagcaatgtccatgtggcctcgcagcagaaggtggtattgaaaccaagggttcctaccttaacaccctagaggaatgacaacactcatttggaaaagggcttctatgtggttatctcaatgaattcttgcatctattcactgagggaggcaggacaagcatcgtcacccccattttcacataagggaatgctacgttttctgtgttacagaagcagaagctatatgagccagtggtgatccctgtgggcaagctgtttcgaccaaatgagagacaagtggctcagctggccaagaaggattacctaggcaaggcgacggtaggtgggattgctcagcttcccctgagtctcctgtggcccgggccatgtggagcaaggtgggagggactcttgagaagagggtagcctccttgtggctctgtccctgggatggcaatgagagacttgtttataggacagaggtttggctgaaagataggcaaccatgtctagtttattttctccaagctgctcccatttctcccttccagctcgaccctgggtgagagccacagggttactcacaggatgctgagtcttagggactgagccaatggagggaaaacacagccatgaggagctcactaaatgtgaagagagggccaggcagggtagctcatgcctgtaatcccagtgctttggaaggctgaagtgggaggatcacttgaggccaggagtttgagaccagcctagctagtggagaggctgaggtgagaggatcacttgagcccaggagttcaaggctacagtgagctatgattgcaccactgtactctagcttgggcaacagattgagactctgtttctaaaaaataaaaataaatatgaagagaacatgttagggaaagagatcagcatgggatcctcttggattaatgctccttgtagttcacgttttagtgggctgaggagtctttccccacttccacagccctatgtttagactatgtcttaaattggacttcttctaaatccaggtcttggctgtgcatggtgactcatgcctgtaatcccagcactttgggaggctgaggcaggtggatcacgaggtcaggagttcaagaccaggctggccaacatggtgaaaccccatctctactaaaaatacaaaattagctgggtgctgcggtgcatgcctgtaatcccagctacctgggaggctgaggcaggagaatcgcttgaatccgggtggtggaggttgcagtgagctgagatcatgccattgcactccagcctgggcaacaagaatgaaactccatctcaaaatagtaataataataataaatccaagtcttaaattctttcagacatggtctgaagtgagtcagcagtgcccttccaaaaccacatttgacttgacacattcatagggctaaagttgcccagtggtcgggtagctgggtctagcatagcagcagaggtcaagaaagcctgggtgagtggaagccctccaaatatctatcaactgatgaatgagtaatcaaaatgtgatatatccatgcaacagaatactacgtagccataaaaaggaatggagtatgattcatgatacaacatggatggaccttgaaaacattatgctatgtgaaggaagccagatacgaaaggccacatgttgtacaattccgtttataggaaatatctggtgcagcctctaagcactgagagagcagagaccatgtctgcttgatctccactgagtcctcacagcctggcacagtgctagacacataacagctctcagcaaaaatgttttgattatatgaatgaatgatgaaaattatctatagtttaagcatatttgtgaataaagctagctttacatctgatttttaaaactcagagaagagggctcaagtcagtcacagaaagcaaaccggttgttgccagtttaggggaaaggggagtgtggacacactgcttaatgggtacagcattttcttctgaggtgatgaaaatattttggaattagagagaggcagtagttgcacagcattgtgaatgtgataaatgccactgaatcattcactttaaaatgattaatttgggctgggcgtggtggctcatgcctataatcccagcactttgggaggctggatgggtagatcacctgaggtcagaagtttgagaccagcctggccaacatggtgaaaacctgtctctactgaaaatacaaaaattagccgggcacagtggcgggtgcctgtaatatcagctactcgggaggctgaggcaggagaatcacttgaacctggaaggcagaggttgcagtgagctgagatcacgccactgcactccagtctgggtaacagagcgtgactccgtctcaaaaaaaaaaaaaaaaaaaaagataatttgatgttatacaaattgcacctcaattaaaaacatttcttttttaagagagaagaaagcaagcctgtgttagcaggggtggggtgaatgctcgtttcttcagttgctgaaatcctaatccagaggctcaggaatctaatccttagttactgtccacgtctgaaaccaggctcacgtaagaacaggtctagggcatgagcaaagagggagacccagaagaatggaaacagtgctggcagagcctcacaccctcctgtccttgattttaggtcgtggcatctgtggtggatcaagacagtttctctgggtttgcccctctgcaaccacaggtaaggcagtcctgaccttctccatggacctaggtctcgagagctttctgtgaagcattcaattcgagagactatgtgtgctgagttgcctgattgtaagggctccttcaagtggccctcagtgcagctgagggatctgcctgccctctctcagtcctggtttccatggctggtgaggaaataaggcagtgtcaggcttcaccccaagtcctctgaagctaactctcctgcttccccacaaatgccggtcttcacatctctaaagagatctgctgatcctctctctgaagcctcaactattctctcaggaagctgaaacacaagctatggaaggcttattaacaaagcctcttcttgagtacaggggcaagtggggaaccctgtggggcctgggcctgaggtttgggctctcctggctctacccatctgctcatgtgcaggggtttccttcgggaacacaggcagcgcactgagagtgaaccctttttctgcccaagctgggcttggagaggtgagctcagatgaactggatgatagtggatctagaaatgcacacagagcttccttgtgaaggaaagaggggaaaacacattaaggaaaatacgaactctgtggcaatgaacctgtgatgggcaagagtgttggtcagcactagcagagggcggttttctgagcaggggcaggtatgttccagatctagattccttgatctctttcttcacaataaagctgatgaaagccttgctgaagtcccttgagcttcagttcagccagaggccatgaggggaatgcagcccaggtaactggattccatggtattcagtgtagaacaggggaggagattcttgcccagtcagtggatcctgtgtcaattttaaatactcagaagtggccaggcacagtggctcacgcctataatcccaccattttgggaggctgaggtgagcagatcacttgaggccaggagttccagaccagcctggccaacatggtgaaacccctgtccctactaaaaatacaaaaattagcagggtgtggtggcacatgcctgtaattctagcaacatgggaggctgaggcaggagaatcacctcaatgagggaggcagaggttgcagtgagccaagatcgcgccactgcactccagcctgggcgacagagtgaaactccatctcaaaaaaaattttttttaaattaatttaaaaatactcagaagtgtcatgtgacatagtagacattaattacagaacagagcttttggaaactgtcctgggaaaaggacagagctcaaggtcaaagcattcttgtgacaccatgttgctgtgtgactgctaacctccagaaactagctctggctcaaaatgaattgctgtgctagtgaaacctgtacctggggagctggtgggaggtgttatttcccagtgtttagtcagggtgactgtgccctcttcctagacagtgttctcatcagtcagaaatgcgttatttgattttctggtctggaagaatgctcaaattaccattagccgtttgttgtctctcccctgctttccctcattgccttttccgttttcacttctcctgaatgttcaataggcagctgagcctccacccagaccgaaaaccccagagatcttcaggtaagttagattcaaatccataaatagaatatccaagcgccaagcctgagctgatggcaagaaagggagggaagaagatgaaggtggggtcagggtctaaatcttgttgaattttctggaatgtcaggcttcttctagaatgtcaggctagaaaggaatgcctagaagaatgtcttctagaatgtcaggctagaaaggaatgatatgatggggatgggagtcttgactgtggtggggctggccatcagggcttggctgcagctacgtggtgtcccattggccctctgtccacgtgcacagccacccacatggcaaggggttgttgctgaggggcagtggtgttctgtggaacatagctaccctggggaccaggatgctgacctcaggttggagatcggtttcgcactggctgcagtcccctctgacgggggcaggccagagctctctggagtcaggaatctagaatgacgtcctttttcctgtgtggatgttttccactccctatcggcacatgctttctgaagaagtaaagaggaaggactgaagaaaaggaagtccttcttctgtaagatgaaaaacaaagggtgacataacctacagctttcttaagaattctctcaaagtgatgaagcaagcctggtcctcccacccaaaaaggaggttttaaaaagtgattggccaggtgtgtggctcatgcctgaaatcacagcactttgggagactgaggtgggcggatcacttgagatcaggagttcgagaccagccgggccaacgtggcaaaaccccatgtctactaaacatgaaaaaattagctgagtgtggtgactgacatgtgcctgtaataccagctacttgggaggctgaggcaggaggctcacttgcactcaggaggtggaggttgcagtgaaccaagatcatgtcactgcactccagcctgggcaacagaccaagattccgtctcaaaaaaaaaaaagtgacaaaagtaccaaagcaactacaaaaatgagggggctggatgagctcattcctaagctccctgtcagctggaagggcctgtattccctacaggagtaggcacgatgtctggaaacaaggatgggccgaggggaaagtaacagagtggggagtaaagggagggaagcctgaaacctgaacaccagcctctcagtcacacgttccaaagtgatgccaatcagagcctcaaagcctaaaagcatgaagtcagacttaagggaaccgacactgcaccacggcagctgggcagcctcagagccctctatgtgcatccctcacgctccctgtcacctaccctgctcacggtctctctatcctggcccaacactggttctaggtggtttctccttcctcctctcccaccaatctttctggcccagctggctctcacctgacttctgctttgtgctgttcccctgaccacagtcacctgatccaccccaccccagcccagccttgggtgctggccaagatgacacagccagggaccttcctcctcagagcagaagggagggcaaggattgtaagtcctcactatctagtgttgtggggtttttgctttattcttgcccctctgcatatatggttatgagcaggtgtacaccagtttcttgctgagacctcttgggagcccaggcaggctcagtgtcatctcggcagttgcagttagatgtggagttagagccaggctggagccaagtccctggctccaagttcagtgtatttgcgccatggcatcatgtgaggggatgggggctggatcttgtgtctatcctctgcagggctctggaaggggaggctcaccgtgtgctatttgggtttgtgcctgagacaaaagaagagctccaggtcatgccagggaacattgtctttgtcttgaagaagggcaatgataactgggccacggtcatgttcaacgggcaggtatgcagaggatcaggggctggtgcgatgggcatgggatcctggcagcaaatgcagtctctgtggagcagtatctgctgccttctttgcagaccagccaagttcttttgtctgttcgtcatcccttccccaggactctgggctgttctgtggtgtgggtactgatgagcacatctttattttttcctttctgattctgtggtgctgcactgcagaaggggcttgttccctgcaactaccttgaaccagttgagctgcggatccaccctcagcagcagccccaggtaatgtgatgccaaggcctgacccatttcctctcaccctttagggatctctccctggaggggagaaaagcagtgtaaaagaggtgttgtcaggacccctggagaaagattcactagtcttgagcccgccttgagatggcaccagctacccagagctgaacctgggaatgaggggaaaaaagcccagatgtgctaagttggaggcatctgtaggtcccattgggcccacccacctctgtgactcttcctggtcagaagtcacttgggaagcaaagcctacagtatatgagtgggttaggtcttcccaagtgtgtctgcttcacgtggaagagtagtcaatgtgttggctggtacaatgccattagaaagaaaatgaggccagctgcagttgctcatggctgtaatcctagcactttggaaggctgaggtgagaggatcacttgaactcaggagttcgagaccagcctgggcaaaatagagagatgccacctctatacaaataaaaataataaaatgagatctgccttagagctttgaatcagagtgggccttgccagccactgcttctaaactgctgctactccctccctcacacttcaaaagtctgtccttctgccaggcctagagagctgtctttgtcagatctgagcatccctgtaagtgactcaatggcagtggagactgtctgtctctagactgtgcaaccagttgtatatgagctcagccctccctggtcagtcaccatatccaaatgctttgaaaagcttcaaatgccttgcaaatgagaagtggaatttttcctttctcaatgccctctgcagtggagacaagagctcagtcctgccccacggccagtggatttccaatatggctgaaagagttgctaaagcggcaagggcgttttagcgggttaggattcttctttctactgtgattttcattttcatcaggccaactccacctcctcttttggccaacatttccttcgtcttccccaaatgtcactaccattccaacttttaggacgttatctgcatgtggctcctttacatggggtctctgtaggggtgtttccccacatccacccctgcctgggaactttgaatgaaggttctgaccgtcgctccctgttgccttcaggaggaaagctctccgcagtccgacatcccagctcctcctagttccaaagcccctggaagaccccagctgtcaccaggtgagtggtcctggagccacagcctaggtctgggtgcagcagcatgccaggctgcttcctgagttcctctccctgccttccaggaaattctggtttcttcttctcccaacatgtcactcagctaatgaccacgcagccccagaatccccctttcctgcaccacccaccccaaacatgaaatcagtgccctctctccctgccttctgcagaacactcacggggcttgggtgaatgcagctggttcctgagtgactcacgtagtcaccaaaccccttgatcattaggtagggaaacgatgtctcaggaagaaaagttgaagtaactatacctgcttatctctgaggggcatggagtggctgttttcaaatgtctgaggcactgtatctggaaaagaaattgctctgtggagccctgaggatgaacaaagaaccaatgggcagatgtgaaatggaaatgttctctctgaaaggctgtttcctagtgtggagagggctgtcttgggaagtgcacttgaagcagattctggataagcgcttggtagagacgcagagtgagtggttggccagattctagatcaatgattgccacacgcgcctgatcatcagaatcactcgggatgtcccttcccccatttttattttgaaaaatgtccaacctacagaaaagctgacagtagaatacaataaacatcagaatatctttcacttaaactcaccaattgttaacattttgcaccatgaactcgccctgctccattctatttttctcccccgagccagttgaaaagttacagactcgtgacacttcaccctacacagctgcaaaaacgcagtctcctgcataatcacaatagaatcatggtatctaggacactaaacattcatatgatagtattatataatgtatattccatattcaaatttctcccgttgctcctgctcaatgtccttgacaggttttttgttgttatcttttgtctagaggctcatcaaggatcacatataaacctaggatgattttgtgaatacagagtcctaggctactggctctgatattttaggactggaatggggctcgggaatttgtattttagaaaaaaacttcccatgtgattctaatgatcagctaggtttgagatcagtggccttctctgatcatgtaccccctatagtaaatatctttatgcatgctactcttacataaattagattaatattagattgcttgattaatagattagattaaattaataaactttaggaaacatacacaaaaataaagaataaggtgaggatcagtggttctaatacttcttcctgtggcctctggctcaccttgcactccgattttcattgctttggatcccgtgggcttaattgacctttgggatccctgctaaccttgtgggttggtgaggatatgctggtcctttggtaattacctataggctccctagaagcagagactgagtttgttcatgtgttcatgaccttcatgcttccccagggcgagattttccccacagtttactaaggttaataattgccccacaaattaaagggtaagaggttgggggccctatttgaagaggtttcatctgtgtgtggcaggggctggccaaggatgttcattcaccatcttcttttgttttactccctactttttccattcaggccagaaacaaaaagaagagcctaaggtaacatttttccctcatactgtttcaagtggtagaagatgggatagcttgggctatcaaccacagacatgtctgtctggattataggaagagccccaaagggagggtcgaaccagttgctaccttacagagtccatgagctagggaccttcttaatagcctcctccactatcatgcacacacttcctactacccaagctagtgggccagatcttactcagtaggaattcctgtccaagcaagggttgggctaaaggacctctgaaggccttttaggctactgtgaaaccagttacttactggcctctcccctgctgtattgggtaccccctgtgccaaatcacgaaactgcggtgatccaggatgttgagagaaagcctcagacactcaggagttccctttgtttcctccccactcaggaagtgaagctcagtgttcccatgccctacacactcaaggtgcactacaagtacacggtagtcatgaagactcagcccgggctcccctacagccaggtccgggacatggtgtctaagaaactggagctccggctggaacacactaagctgaggtgagctccatgcaggcagctgtgaggggtacagtgggaaccttgtgctggcctggaggagggaagaggaggatggtttttgtgatgatgttctttgactggattcttactcattatccccacccagctatcggcctcgggacagcaatgagctggtgcccctttcagaagacagcatgaaggatgcctggggccaggtgaaaaactactgcctgactctgtggtgtgagaacacagtggtgagtgcaatgaggggcatctaaagttacatttccactgagccacttcctcaacaatttgaaatttatcaagcaccttctgtgtactaggcactatatgtggtgttggggatatggtgtgtaataagtcacagctctgcctcccttttacctgcatcctcaccccatttgcagcagggagagagtttcccacaagagaacagcaggcccagcagggcaggagctcacagaaagcctcctgcccctccatcagctccctgcctgactgtgtcaaacatcccatccattactgtcaagcaaggttggaatgaagtcatatcatagcttaaggctcagctcatagccattcttcaccttttttttttttttttgagatggagtctcactctgtcgcccaagctgggtgtgatcttggctcactgaaacctctgccgcccaggttcaagaaattctcctgcctcagcctcctgagtagctgggattacaggcacctgccactgcacccagctaatttttgtatttttagtagagacggggtttcaccatcttggccaggctggttttgaactcctgaccttgtgatccacctgcctcggcctcccaaagtgctgggattacagacatgagctgggagaagaagagtgaaagagaatgagcctagaaaagggcagtgtataaagctgtttaaggtatcttccccgttcagaaaattgccttcaggaaatacagccactggggatgagactccctggtgtctctggctgagacaaaaggccccaggatcctgggggtaagagtgagtgtgagtgtaaggggtctcttggaagtctgaaaagtcactctaggttttccagctgtctgtctttggactaaccccttcagcatcttttttaaaagattcttcctagaaggagttctgctctaaatgtgaactacttcacttaaacttttttttaattaaaattttttcctttgacagcagcttcaatctatttggtggctgcacatagccaaccctcttacaactccccacaatcttttgcaatttaatccaggctcaggagtcactgttgaatgttctttatcactatccattacttttggaggcaacaaagcaggctttcacttactaggagaaagaaaaccaggcgcagtggctcatgcctgtaattccaacactttgggaggctgaggcaacatggtgaaaccccatctctactgaaaatacaaaaattagctgggtgtggtggtgtgcacctgtagtcccagctacttgggaggctgaggcagaattgcttgaacccaggaggcggaggttacagtgagctgatatcataccactgcactccagtctgggtgacagagagattctgcctcaaaaaaaaaaaaaaaaaaaaaaaaaaaaaaaaaaaaaagaggcctggtatggtttatgcctgaaatcctagcactttgggaggccgagatgggccagatcacctgaggtcaggagtttaagaccagcctggccaacatggtgaaaccccatctgtactaaaaatacaaaaaaaaaagaaaagaaaagaaagaaaaataaaatgaactaacatttattaagcatctactctatgcaggaacacttaccattaaccaagtctaaatatttatacatatttagaagagtactgccacagagtaagtgttcaataaatgtcaactactattattgtatgtcatctcattgaattcttctagcctcaatttcaggtgaggtaactgaggttctgagaagttacactgcttgcttagggacacagagctggtaagcagtggaggtgggatacaaacctttctctgtggactctctagggccatttccacctcattgtattgcctctcaataaaaatataccaacgttcaacaaacaacattaagaagctagaacttataatgctcggtacatacaagcctagcagcatttctaatgttgatttgttaaattctatgattcacatctgtagaaaccgcatccttctccttcatttgtgaagcaaaagtgacaataatgtggaagaagtctaagatcataagtctaagatgtataagaaatgttgttacagataaaacaagtatggcattgtgcagtggtttttgaactttagcaagtatcagaattccctagaggacttaaaatacagattgcaggattcaccttcagggagtttctgatttagtagttttgggatggagttgaaagtctgcatttctaacaaggtccctagtgttgctgttagagttgatgctaagaaagccagttttgacttagggctctgtccccatctgtaaagaaataataatgcccattctacctgtctcaagattattgtaaggtttcagtaagatattttaagactgtatatgattttgcagaccttttggtttcatttatcccaggggtccccaacctccaggccacgggccagcacagggctgcacagcaggtgagctgcaggtatactggcctgagctctgcctcctgtcagatcagcagcagcattagattctcataggagtgtgaaccctattgtgaactgtgcatgcaagggatctaggtcgcatgctctttatgagaatctaatgcctgacgatctgaggtggaacaattttatcctgaaaccaccccccaacccaccacccaccaccattcatctaaaaactgtcttccatgaaactggtccctcgtgccaaaaaggttggggactgatttacccaaccatccagtattcataaagagcatataagctctacacaaggcactgatcacaaactttatgagtttatatcccaggttctactttgacatttcgctgtttcctttagtgatgttcagtgttcacttggcaggaaattgggaaaattaacaggccctttattatttcagggtgaccaaggctttccagatgaacccaaggaaagtgaaaaagctgatgctaataaccagacaacagaacctcagcttaagaaaggcagccaagtggaggcactcttcagttatgaggctacccaaccagaggacctggagtttcaggaaggggatataatcctggtgttatcaaagggtaagtgctactccaagactatagaaacaaatttacatgttagcagaaacaaggtcaagggcagagagaagaaaatatcaataatctacaaacaaaactttagccagtgttttcaacccccttcctagcatctagctggagggagcaaagttgagcactcagactttccctgtctattgctctagtagccaggaaagcaacaagaagctgagttgttttgtttttgtttttgtttttgagacagagtccccctctgttgcccaggctggagtgcagtggcacaatctcggctcactgcaacctccccctcctgggttcaagcaattctcctgcctcagcctcctgagtagctaggattacaggcgcccaccaccatgcctagctaatttttgtgtatttagtagagatggggttttgccatgttgaccaggctggtctcaaactcctggcctcaagtgatccaactgcctcggcctcctaaagtactgagattacaggcatgagccaccgcacctggccggcgataaacatcttgattattaaagaggagtatgctttggaaaccatggattctcattcccagaggtaacaaattgggctggaatcactttgcctttgcatcaagctgtatgaccttctgcaaaccatagttctttgaattaatgtacttttcaaagagaaaagtaggtaaattttgccttaaaaaccagctattcagaactatcctgtgtctctggtgactttcttgattctgtttgtaatgaacagactaaaaattgaaacagcatgcctgtaatcctagccactagggaggctgaggtaggaggatcacttgaggccaggagttcaaggctgttgcctgggcaacacagcaagacccacctcttaaaagtggagagttctaagaatccctggaagagtttgttaaatcaattcctgggcccaccctccagagattctgattcaggtctggggtggggcccaccaacttgcatttctaccaagtttccaggtgatgctggtctactgcctacactcttaagaagcaccattccaactcgtggtttgccagcctaattctctacctcgacacaaaaaagtcccatcataaaagccctgctcatacgctgagtctgtgcactaccaatgcaaagcagtgaaaaactaccatcaattataacagaaaatccaacagacaaagagagggggaaattttaaagttaatgagggtaggctgggcctggtggctcacacctgtaatcccagcactttgggaggctgaggtggtggatcacttgaggccaggagttgaagaccaacctggccaacatggtgaaaccccatctctactaaaaatgtaaaaattagctgggcgtggtgatgcacatctgtagtcccagctgctagggaggctgaggcaagagaatcgcttgaacccgggagtggaggttgcagtgagccgagattgcaccactgccctccagcctgggtgacagagcgagactctgtcttaaaaaaaataaaaataggccgggtgcagtggattatgcctgtaatcccagcaccttgggaggtcaatgtgggctgactgcttgaggtcaggagttcaagaccagcctggccaacatggtgaaactctgtctctgctacaaatacaaaaattagccgggtatagtggtaggtgcttgtaatcccagctattcaggaggctgaggcaggacaatctcttgaacccaggaggaggaggttgcagtgagctgagattgtgccactgcactccagcctgggttacagagtgagactcagtctcaaaaaaaaaacaaaaacaaaaacaaaaaaattaaaattaaaaaaaaagttaatgggggtagagagagtatacaacaagtgtgtagcaattaattaaaaatatgagtagtataggctgggcgtggtggctcatgctggtaaccccagcactttgggaggccaaggtgagtggatcacttggggtcaggatttgagaccagcctggccaacatggtgaaaccccatctctactaaaaataaaaaaattagccaggcgtggtggcgtgcacttgtagttccagctccttgggaggctgaggcaggagaatcacttgaactagggacatggagcttgcagtgagtcaagattgcacctttgcaccccagtctgggcaacagagtgagattctgtctcaaaaaaaaaaatatgagtagtagtaatatagaagcagagtgttccaacaagagagaatggtaactcagtgggaagaactgggttgaacacctccaagtgccactttaaaggtgcctaaatcaaccaaccagctcaattgtctggagtttgggagagggagcaggaatacaatgaaagaacacactaaaacaaccttttgggtagatatggagagaagccagtatgcgtcttactatgacctatctgtacaagtctaagttgaggaaatacccatattgtagcacttcaacagaaaacagaatttagcggtcagggtaggacagaggggagttcaattgcattcaagttatgagatggtctcatctacaaagtgtttctcaaactttaatgtgcatgtgaatcacctgcgaatcttcctaaatggattctgactctggtttggatctgggatttttcatttctaatatgcttccagtccacgacctaccctgtaagaagaatcaagacagtgatttgcagttagaattacctaagggaacttttgaaaaaactgctgcccagtcacaccacacattaaagcaaaatttctgggggcaggatccaggcaccagtgccttaatgtctgatctagatgtacaaagacaaacttctgaactggctgtgtggtcaggtaggtgggctttggagatcatacctaagttgtctgatttttactggcagaatggctctgaacaaactattcatctctctgggtctccttttccttagtaaaatatggatacctacaagttattatgaagtctgaatatattttttaagtacaatgcctgcactctattaaaggctctgagtaggagctattaaaatatttatatttaacaaacatgtactaacccatcactagctccagctcacctgtttaatggagttcagtgaaaagaagaaagtttactaaagaactttcatttttaatatatttaaccaatggcatgtcccttttctgtagtcaaaacaaagattcccaacaaagcgcaggtaaaattctctcctctcttaaaaaattgggccaggcacggtggctcacccctatcaccacagcactttgggaggctgagttgggtggatcacttgagcccaggagtttgagaccagcctgagcaacatggcgagatcctgtctctaataaatacaaaaattaaccaagcgtggtggcacagcctgtagttgcagttacttgggagtctgaggtgggaggattacttgagcccaggaggcagaggttgcagtaagcccagattgtgccactgcactccagcctgggtgacagtgagaccctgtcaaggttgggggtggggaaaggacagaaattctatttaaggattcgttgttcaatttctttgacccttcttctctatctggtaactttttgaaaaacataatttatccttcttcattttgctcattatcatgtttaagacagatcaataagatggttaaaccctgtgttcactctcaaaccactttgcaatactgtcttttccctgttgatcacaattaggggtggggaagggtgacagataacaaattctgtgtggaatagccagacagggtaatcttcctacagtggttttagaaatccatgtgtacttttccttttatcagtgaatgaagaatggctggaaggggagtgcaaagggaaggtgggcattttccccaaagtttttgttgaagactgcgcaactacagatttggaaagcactcggagagaagtctaggatgtttcacaaactacaaagctgaagaaaatgaagccctattacttgtttgtaagatttagcacccttctgctgtatactgtactgagacattacagtttggaagtgttaactatttattccctgttaaaatttaacctactagacaatgatgtgagtacccaggatgatttcctggggcacagtgggtgaggagatggggacaggtgaatggaggagttaggggagaggaaaagtggatggaagtgtctggaaagggcacgagagagtcttccaggtactgatcctgtttcttgctctgagtgctagctagccagctgtgttcacactgtaaacattcatcaagctgtacatttggtgcacttttctgtgtcataccacaataaaaaaaaacctagcatcttacaaaaacaagacacccaagtccaggcccaaggagtaagtacaaatattcctgtttctgaaccattactgtaattggctcttaaggcttgaagtaaccttataggttactcataaggcatatacaaataaacttgtttgttttcttttttca

SEQ ID NO: 212 - DNA, 5466 bp, Homo sapiens
ggcaggaagagggggactctgtggtcagggaactgctcgctgagcacagctgcacagtgctgtcagaacggccgatctccagcccaagatgattccagcagtggtcttgctcttactccttttggttgaacaagcaggtaagagggtttggtgagggatagcgtgagctggctccagggtggaagtccagagcttgggtctgagggccaagtcaaacacaggtgaaggaaggctgacagtgggtaggtgggcatagggagaccctgaggctagtcctctccagccccgacccagggcactagactcatagttccctcctttcttgttgccttcttacttcattccagacttttctccgtattattattattattttggagatggagtcttgctctgtcacccaggctggagtgcagtggcgcaatctctactcactgcaacctctgcctcctgggttcaagcgattctcctgcctcaggctcccgagtagctgggactacaggtgcccgccaccacgcccggctaagttaagtatttttggtagaaaccgggtttcgtcatgttgaccagggtagtcttgaactcctgactcaagtgatccacccacctcgacctcccaaagtgctgggattactggtgtgagccactgcacccagctattattattattaaaaaaagacagggtcttactatgttggccacatcggtcttgaactcctggcctcaagcaattctcccacctcggcctcccaaagtgctactgtgcctggctgacttttctcttttcagggttgatagaaagtggcaggggaagggtctggttgtatggcatgaagagctggtctggtgaaaagcctcatttctcatgatgagcatttcccatggggtgcctttggtcttgtctgctgggagctgatctctagctggtttaatatacaaagcacccttggtgcctataattccagctactcagaaggctgaggcaggagaatcacttgaacccaggaggtggaggttgcagtgagccaagatcgcaccactgcactctagcctgggggacagagtgagactccgtctcaaaaaaaaaaaaaagattttacatatatatctctatctatctatctatatacacacacacacacatacacacacacacacacacacacacacacacacacatatatatatatatatagagagagagagagagagagagataaccctttaggaaggtaggactctgttcttgtgcttgggagtaaggcaaggatatagccaagacaaacagacgggattgctgtttctatgggtcattgttaatgctccattctgtcagcagttgataatgagggtgggcagcatgagatccccagttccagagacctgagcgtcagctgagaaatagaggcagaaatgggaaggtctctgaagctctacagctccagccactatctaagaattctcactcctcgttcactctgtgttgtctgtgctggattggtgtgtgtgtgttggtggcagctgggtgttggggaggaggaggtcagtaaacttcagggaaactgtggaaattgaaagagaatgactggggaggaattccagcagcctagctgagaaggtgggagcaagtattaagttagccactggtctgctgccgtgggatgaggagggaggaggcccgctgaggcacaaaggaaagcatgggctttagaggcagaaaacctgcatttgagttccagctctgtcacttaactctgtggctctgagtgagttacttagcttttccgagccttggtttcgtcacccataaaatggcgatgatgatgtttccctcacagggtagttttaagatttgtgcaatatcgtgtgtgtgaaagagtgttgcagaataaaaagtacttgaccgatgtcagcaattgactgacgttagtcacatgttccctactggtcctctgatacggggtgagagcagtctctggagcccagacttgatttgattttttaaattgcacaaaacttcccctctcagagacccagagagtgagtaatagggcagagtaacaggagctggaatccatatagctgtggtcattcccccagccttgtgttcagggccaaaggtatctgtaaggtctgggaaaaacagacacactttttttttttttttttttttttacatatttaagtgtcttgtggtgggacagaaagcaacaaggctgaggctaggagatgaccaatgatagagtaattgccttctctcccttccccagctcacatccttcctgtccagccctcagccacaggtcacaggacttagtagagacacttctgtggtttcttcactgaaatttgccactacctctccctcccactacccatcttggctgaggttttggtttcagtccagtggactcagatgggtcccttgaggtggataaagtgctcaatggtgcctgaagaacccacagtgctaaaaagaaaaggttgggggctgagggggaaggcctcaattattagtccgtgtgagtcccatttcaatagaaccctcaagcttcctatcctagcctgaccctatggtgtgggaggagggaaaggtaagggcagtggaaggccagagagaaacagaatttcttcccttagacggctcccctccaggccctgtcctacctcccagagccccttcccttctctcctctgagtaccagatcctccctgatacccccgaccccatgggcatcctctatcccctcagcggccctgggagagcctcagctctgctatatcctggatgccatcctgtttctgtatggaattgtcctcaccctcctctactgtcgactgaaggtagcgctgggcagggtggggtaagggctggaaggggaagtgggaggagggcagcagcaaggattcgaagagaaggaataaaaggggatcctccacaaagtttggagggaagggggatgggccattaacttaccctttactgataacctttcccccattccagatccaagtgcgaaaggcagctataaccagctatgaggtatggaccctcctacacctggtgtggacaacttttcagaccctcagccctcctggggctctagcctgggtttccgggcctctgggagggcctgcctctcaggtgctgatctgcatacacctcagaggcctccctcccaccttacctagccaagccacaagtaaaatattcagcaggtgacagggaagaatcaagcatagagtgataaagaatatgtgagagacttggatgtagtatgtcgggtgtatatgtgtgcttgtagccatgtgggcaaacaggtatccatgtcccagagtgtccatgtgagtgccctctagcccaaggtggctggctgcccaccccccatgcctccctgggtggggcagatgctgaggggccctggagaaagtgtgggtctttaatgttttgcttcttttgtctctgcagaaatcagatggtgtttacacggtaagtgtgcctacctcccccacccaggaagtcagcagaagagggtgggattttgagcgatctttggaaggccggtggggggaggggggtcctgtggaggtgggaggggcctctgatggactccagctcctgatcgccctttgactcccatctccagggcctgagcaccaggaaccaggagacttacgagactctgaagcatgagaaaccaccacagtagctttagaatagatgcggtcatattcttctttggcttctggttcttccagccctcatggttggcatcacatatgcctgcatgccattaacaccagctggccctacccctataatgatcctgtgtcctaaattaatatacaccagtggttcctcctccctgttaaagactaatgctcagatgctgtttacggatatttatattctagtctcactctcttgtcccacccttcttctcttccccattcccaactccagctaaaatatgggaagggagaacccccaataaaactgccatggactggactctattcattcattcattcatttatcatagatttattcagtctctgctaagcactagatacagcttttcagttccagaactcacagtctaatggacttcagagctattttgctcgactgagggataaatgctgactatggctgggggagggataaaaacctttgacctgtaggtgctctgaggatggagctggagcagggactagtgtgttgggagtctaggcatatttggaaacataagaaatgacttctgtatcagcatggccttctgtgttcgacaattgaaccaaggttgggttgtaggggaggctgggtgtccccagatggccaccaatccagacagcatcaatccagtacatgcatatgggaattagcatagctgaaaagccaaatatgcagaacggatggtgtaactagggctgagtgaagctcctaatggaaggttttatagcaacagtgaattttcagggcatctggggcaagtgggaccttagagggccagatgggtcagtggtaggtaaggcaaagggaaataagttgggtccaaatgggggggtcatctccttcaagtgcatgggtggtggtcaaggccctgtcaatgcctgtcctgttttcagagctacgaggaatatttgcctgaaagaatttaaacctcaggagatgctgccagtcctactcgtgacccagtcttttcagaatgggtctagagactccaagcttacccctggcataacccccaacctccacagtgctgcacaacacttcacactgcatagtgacttacacttttcaaagtattttccagctcattgtaccatttgatctgctaattaaccctgtgaggaaattcaggctctttgaagttaattaacctgtccaaggtcaccttgcaaggaaccgactgagatcactttcgtctctgcacattttgccacatgagaagaagcagatattgggaaagagaaggggtagtgagtaatcatgaatggcgagggtcttgaaggccagatgaagcaggttgatcaatatctggaaggaattggagccatctccggtgtctggcgggggaaaggtgatttcagatgagataagagaaatgagccagggtaggaaagtaacttttttttttttttttttttttgagatggagtctccctctatcaccaggctggagtgcagtggcatgatctgggctcactgcaacctctgcctcctgggttcaagagattctcgtgcttcaccctcccgagtagctaagactacaggcaccaccatgcccagctaattttttttgtatttttagtagagacagggtttcactatgttggtcttgatctcttgacctcgtgatctgctcgcctcagcctcctaaagtgctgggattacaggtgtgagccaccgagcctgacctggaagtaactcttttaaagataaagtgggaataaacttttatt

SEQ ID NO: 213 - DNA, 3817 bp, Homo sapiens
cgcggccagaaacttcagtttgttggctgcggcagcaggtagcaaagtgacgccgagggcctgagtgctccagtagccaccgcatctggagaaccagcggttaccatggaggggatcagtgtaagtccagtttcaacctgctttgtcataaatgtacaaacgtttgaacttagagcgcagcccctctccgagcgggcagaagcggccaggacattggaggtacccgtactccaaaaaagggtcaccgaaaggagttttcttgaccatgcctatatagtgcgggtgggtggggggggagcaggattggaatctttttctctgtgagtcgaggagaaacgactggaaagagcgttccagtggctgcatgtgtctcccccttgagtcccgccgcgcgcggcggcttgcacgctgtttgcaaacgtaagaacattctgtgcacaagtgcagagaaggcgtgcgcgctgcctcgggactcagaccaccggtctcttccttggggaagcggggatgtcttggagcgagttacattgtctgaatttagaggcggagggcggcgtgcctgggctgagttcccaggaggagattgcgcccgctttaacttcggggttaagcgcctggtgactgttcttgacactgggtgcgtgtttgttaaactctgtgcggccgacggagctgtgccagtctcccagcacagtaggcagagggcgggagaggcgggtggacccaccgcgccgatcctctgaggggatcgagtggtggcagcagctaggagttgatccgcccgcgcgctttgggtttgagggggaaaaccttcccgccgtccgaagcgcgcctcttccccacggccgcgagtgggtcctgcagttcgagagtttggggtcgtgcagaggtcagcggagtggtttgacctcccctttgacaccgcgcagctgccagccctgagatttgcgctccggggataggagcgggtacggggtgaggggcgggggcggttaagaccgcacctgggctgccaggtcgccgccgcgaagactggcaggtgcaagtggggaaaccgtttggctctctccgagtccagttgtgatgtttaaccgtcggtggtttccagaaaccttttgaaaccctcttgctagggagtttttggtttcctgcagcggcgcgcaattcaaagacgctcgcggcggagccgcccagtcgctccccagcaccctgtgggacagagcctggcgtgtcgcccagcggagcccctgcagcgctgcttgcgggcggttggcgtgggtgtagtgggcagccgcggcggcccggggctggacgacccggccccccgcgtgcccaccgcctggaggcttccagctgcccacctccggccgggttaactggatcagtggcggggtaatgggaagccacccgggagagtgaggaaatgaaacttggggcgaggaccacgggtgcagaccccgttaccttctccacccaggaaaatgccccgctccctaacgtcccaaacgcgccaagtgataaacacgaggatggcaagagacccacacaccggaggagcgcccgcttgggggaggaggtgccgtttgttcattttctgacactcccgcccaatataccccaagcaccgaagggccttcgttttaagaccgcattctctttacccactacaagttgcttgaagcccagaatggtttgtatttaggcaggcgtgggaaaattaagtttttgcgctttaggagaatgagtctttgcaacgcccccgccctccccccgtgatcctcccttctcccctcttccctccctgggcgaaaaacttcttacaaaaagttaatcactgcccctcctagcagcacccaccccaccccccacgccgcctgggagtggcctctttgtgtgtattttttttttcctcctaaggaaggttttttttcttccctctagtgggcggggcagaggagttagccaagatgtgactttgaaaccctcagcgtctcagtgcccttttgttctaaacaaagaattttgtaattggttctaccaaagaaggatataatgaagtcactatgggaaaagatggggaggagagttgtaggattctacattaattctcttgtgcccttagcccactacttcagaatttcctgaagaaagcaagcctgaattggttttttaaattgctttaaaaattttttttaactgggttaatgcttgctgaattggaagtgaatgtccattcctttgcctcttttgcagatatacacttcagataactacaccgaggaaatgggctcaggggactatgactccatgaaggaaccctgtttccgtgaagaaaatgctaatttcaataaaatcttcctgcccaccatctactccatcatcttcttaactggcattgtgggcaatggattggtcatcctggtcatgggttaccagaagaaactgagaagcatgacggacaagtacaggctgcacctgtcagtggccgacctcctctttgtcatcacgcttcccttctgggcagttgatgccgtggcaaactggtactttgggaacttcctatgcaaggcagtccatgtcatctacacagtcaacctctacagcagtgtcctcatcctggccttcatcagtctggaccgctacctggccatcgtccacgccaccaacagtcagaggccaaggaagctgttggctgaaaaggtggtctatgttggcgtctggatccctgccctcctgctgactattcccgacttcatctttgccaacgtcagtgaggcagatgacagatatatctgtgaccgcttctaccccaatgacttgtgggtggttgtgttccagtttcagcacatcatggttggccttatcctgcctggtattgtcatcctgtcctgctattgcattatcatctccaagctgtcacactccaagggccaccagaagcgcaaggccctcaagaccacagtcatcctcatcctggctttcttcgcctgttggctgccttactacattgggatcagcatcgactccttcatcctcctggaaatcatcaagcaagggtgtgagtttgagaacactgtgcacaagtggatttccatcaccgaggccctagctttcttccactgttgtctgaaccccatcctctatgctttccttggagccaaatttaaaacctctgcccagcacgcactcacctctgtgagcagagggtccagcctcaagatcctctccaaaggaaagcgaggtggacattcatctgtttccactgagtctgagtcttcaagttttcactccagctaacacagatgtaaaagacttttttttatacgataaataacttttttttaagttacacatttttcagatataaaagactgaccaatattgtacagtttttattgcttgttggatttttgtcttgtgtttctttagtttttgtgaagtttaattgacttatttatataaattttttttgtttcatattgatgtgtgtctaggcaggacctgtggccaagttcttagttgctgtatgtctcgtggtaggactgtagaaaagggaactgaacattccagagcgtgtagtgaatcacgtaaagctagaaatgatccccagctgtttatgcatagataatctctccattcccgtggaacgtttttcctgttcttaagacgtgattttgctgtagaagatggcacttataaccaaagcccaaagtggtatagaaatgctggtttttcagttttcaggagtgggttgatttcagcacctacagtgtacagtcttgtattaagttgttaataaaagtacatgttaaactta

SEQ ID NO: 214 - DNA, 30924 bp, Homo sapiens
aaaacactcattttgttttatagcatgacaggctgtctgattccatctttataaccaaagccaattaagatcttaaaaccaaacatataacttcatctttttacaagtacttagagcctgagttgctccacaggaatccaggaactgggcacaggaaaaggatctaagctggtggtaagttggggtctgaaaattttaaagttattgttgaaatgcctgctatatgacagagcccttctaactctggagtagcgtagtccagtgaagaatccacttcgttagtatgaaaacaatgttaactatttcattaacagtgtttaatttggttacatgttccagtaacattctttttttttttttttttttttttttttttgatggagtcttgcgctgtcacccaggctggagtgcagtggcacaatctcagcccactgcaacctctgcctcccaggttcaagcgattctcctgcctcagcctcctgagtagctgggattacaggcacctgccaccacgcctggctaattttttgtatttttagtagagacggggtttcaatatgttggccaggctggtcttcaactcctgacctcgtgatctgcccacctcggcctcccaaagtgctgggattacaggcgtgagccaatgtgactggccaattctttatcatatatgtaattaaataaaatttattactaaaataatttccccaaaggtgttttacttttttaaaaacagtggctacaaaaaaattttgagtcccatatgtagctaaagttaacacattatatttctactggacatgtagcattgtagagatgtagcattgaaggatcttgatagtcctgtggagcttacgtactagtgtggagggtatttaagagagaagataaatgaacaaacaaataaaggagaaaagtatctggtgagataggctgtacctgagcattctgctttgcagagtgggtgaggtgggatctctctgaaataatatttgacctgaaatatgaatattcaggatgagccaggtgcaggaagctcaagacgaagagcacggtaggcagaaggaatagagaaagcagaagccctgagatgacaaagagctgcaagttcaaggaattagagcccagtgggtggagcccagtgtgtctgatgagagtgcagagatgaggtctgagggatgcacagggcacatgtggcagtggataagggaacctaggataagggaacctaagataagggtaacttagaagtctggaagccatcggaaggtattgcgaataacatcaccatcttattggacctttttaaagctcatttggtttctgtctggagaatggatcttaggggagggggcagcaggaccaggaaaaagctatttgcaaggcttgtgcaaatatccaagcctgacagggccatggacaccggtcgtggagatggcaatggctctggctgtgcattcagcatgttctgtagatagaatgagtaagacgtggatggcgttgggtggtgaggaaaagagaaatgaaaggtgagttctagatctggagctttaacaactgaatatttaatctccaaatagatacagaatattggaagagtggcaggtctgggaggcagagaacatcaacagtttggtaaaaccatgtgaggtttggagtctatgggactcccacggggagaggttttatcagacttgagtgccagggagaggccacggctgataatttagatgaaaagacagcataatggtttaatcccagagactggatgatatcatttatagaatgtgagataccccaacatttagagtcaaatttagaatagaaaacaccgtaaattggactaaaaagaggaagagaatcgagctgtagagacgaccaagagtgtattgtgtgcacatatctcttggatatatctcatggcataggaaaaatgtgtttgaaaagggagaaagtgatccaatgggtcctgtgtcattgggatatcaggtcttaaaaactgagaaggactcactggatttggcagcctgggggtcataagcatccttgggaaaatgcattaggtggagtgctaaggacagaagtcaatgtggagtggattaaggagaacagctgaggcgaagaaggaaaaggaagaattagagacattctctttggatgtttggctggaaattctgtcttacagacagaccttacagagaggtcatttggctagatagggttgaagctggaaagaaatatgcttcaaaggaggtttctcttgaaagagagggggcgtgattatgtgatagaatgatctagtagaaatacaattttcaatttttttggtataaaaaatgatcttttatccctcaccacatcccacctcaatctaagtcttaactttctcgtctgtacaatggttatacaaattaaaactaacattaatcaatattcaccgtgtctcagggtgtgttgagtgcttacacatattaacacatcccatccacagagcctatgagaggagttgtgagggttaagggagaagctcttggtgtgtggataatgttcataagtagaagctactattgctataagcatcgttcttgtcctgaccctgagcttcatagtgcagggttcgggattgtaccccacaacacaacacacagcctggtgagggctaagagttctaatttgttacagatttaccgacctatcctagatgatttccatgtctattctttttttttttttttttttttttgagacggagtctcgctctgttgccaagctggagtgtagtggtgcaatctcagctcactgcaacctctgcctcctgggttcaagcgattcccccacctcagcctccagtccatgtctattctatttaatcctcccctgaaaatcagtctttatcaaaaaaccatttcagttctgcagaggggaaaatgggggctcaaagagatgtcactgatcaagaatttacaccatcgaggtgtcagagataagatcagagtagagatctaactgactccaaagcctggtactctttacactgttacagtgacacccaactggcagggggagggggtgggaggtattttgcctcccaggggatctttgacaatgtcttttggttgtcactcctgaatggggagttgctactggcatctctggatagcggccaggggtgccgctaaacatcctactgtgtacagaacagtccaccacaacaaagaattaaccagcccaaaatgccattggtgtcaaagctgagaaaccctgagctacactaaacaatgtccctgggaagacctcagtgaaagtgactgataatgataggaaaaaagaaggaaatgagtaaaagaaataggagaaaaaatttattatacgagggcaggaccctatcctggtaattttggaagaacgcctttcaatggcagcacttgagcgtgcaaaggtagtggctctgttcggtctggtttacaaatcttcctgtctccactgactggctaggtatgatgctgaaaaaactacaggagtccctgggccatggattctccctagtaaaaaagggatgatgatggctgcctcacagtgttattatgagtattagatgtaaacaagtgctacataattgctatcattcttaaagaggctaaatagcccagggtgggaagattctcagattttcatgatcatagaaaattgctgtagcttggctgggcgtggtggctcacacctgtaatcccagcactttgggaggccgaggagttcgagacagcctggccaacatggtgaaaccccatctctactaaaaatacaaaaaattagccgggcgtggtggtggtgcccagctactggggaggctgaggcagaagaattacttgaacccaggaggcgaaggttgcagtgagccgagatcacaccgctgcagtccagctgggtgacagaggaaaaaagggaaccattcggacatttgcccctgaacttgaagtgcgccacaccccactcccactgccagttgccacccccgtcagctctctttctgcctgtcctcttgctcctctgagtgtggcctccagatgtctcatgtacctcccggggtctgtgaatactaaaacctctcgaactttaacactgtcgtcgcctcattgaagccgcacccacaatccaacccacgatgtgaggctgcccgaaagcgacctgggcagttggatcccctcttgatgttcttttgtcctgacctctggtggctgctgaggatggtcactagcagctgagttgatagagaaacttgaagagcttcatttaatactactggcatagcaggcaggcttttggctgtgtcttggacacaatcccaatgtctgtgtgtgtggatgactcacgcacttcctgcatcagacagcccagtcggtctggcccagacggcactactgcttgctggtgctccattttgctgcttcgtgcagcttagtactgctgtcctcagcagttaacttggagattctccagaaattccagtgaccgtggacggctctttgaggctccaggctccccagcagctgcaggagggcagatcctattgtaatgagggtgtttccctgtgggacatcagaaaccctttctgggatcaggcccctgacagggggccactactggagggcatgttgccccttgagccatacatgcttctctggtgacctagggcctcggtagtggtccggcctgtattggctctaagtagcaaagtactggcctccagccagagagagctggccaggatgctgagctggccacccggtagcccatggctcgatcctcagctctacctccatcttgctgatgatagggccatgggccaccaggctcctggggagcagcgattccaccatagtgaagttgaagaggatgacagaatgctggcttcagtgtgtcagtgaaggggagctgggtgaaagggtccagtcgcctaactctaacctgtgacacggcaactgcacctgagtccccagggcaccttgcaagagccggtgctgctgaggccagtgcctccttggttgctgcattccttggtgctatcacttctcgttctcccagcccctcagaggtcgatcgggtcaccctggaaagaaaagcggctgcctacaaggccagtgcaagtggagctcattgttcggttttgaagagaaagtgagattaaagaaagacacacaaagacagagtgtctcaacagcaaatgcaggcatttatgtccagtataaacctgcagaggtgccagtgcccaccactgcttacaggctggggcaattacaggcctgggtgggagaggtctggaagtggagcatggcccgttgcctgggaaaatgttgataacatgttcccatgatgaggcggtttggcacttgttcctgcagaatgtgatagtgatgttccttgggcctttgcccggcagagtgtgataaggatgttcgtgtgccttgtggtcaggtggttgggcaggatgtttctcatggcccgaaaccccatggaatgtttcactttgaccaaagtctgcaaaatggtggggggcttacaaagtggtgcagtttggactaactctcaataccatttttttttcttttttggtaacaatgtgtaaagtgaaaacagcagagtgctactccataccactgggatcttgtccagtaaacatccagagagtgaggttaggaaataaaaagtatataaatattagatgcctagaaatgcaagtcactttaaagattttatgtgaaatagaaaaaaaagagaggagagggactcattgtcttgtaatgggtccttcccagagagaggtgactgtccagtggcaccgggcccttttcctccttccccttttactcttatcaactaggacagaaactaagaattttggcttcaagtggctaaaagactgatgggggaaaaaagaaaatagaaaaaaataacagagagactgacgctctaggcagttacaagtccaagaaaaaagacagaaacttttaactttaagtattgagccaaaaccaggtctagcaaacataatgctggccctagattatttattaatttatgaagaaacttctagatatgggggtgacaaaaggaaattaaatccattatatatgcatatattttaatgtaaatatataatagataaattatgtatacataatatagaaccaaattgaaacagttttacaatttggtttgactggaaattcaaaatccatatattaatttttgtagtaaaagtttatgtaaaaaaagacaaaaaggacactgattggcttttgttcctctacaatataggttctaacttaacttctaacattagcggccggacgcggtggctcacgcccgtaatcccagcactttaggaggccgaagtgggcagatcacctgaggtcaagagttcgagatcagcctggccaacatggtgaaaccccatctctactaaaagtacagaaattaaccgggcgtgatgctgggtgcctgtaatcccagctactcaggaggctgaggcaggacaattgcttgaacctgggaggtggaggttgcagtgagccgagattgtgctactgcactccagctgcacgaattgacaaaatttatggacttcatagtgggattcaaattatagttatacatagggatctcattaaatttacttactctactcccataatcttgagaagctaactaaaattttgaaaaatgagtagacctcactttatctgtagcgtcgcctaaatttcccagtcatacagtcattgctctaaaatattctatgttggacatagattctgtgacacaattaataacaaattaaaattaaagtaagcttttggcacttacaaattggcttgatcaaatgaggccccttagtcccccagttaagataatttattacggcccaatagaagttgaaacagcaccttcaaggattaaaatttattatataaaaccgaattaataaaagcgtgattatcgacaccacatctccatttagcaacccaaaagttcttcctgttcccaaatctgaaaaaaaaaaaattcgtaaaaatgccttacgatggatgactacagcagacgggctgttgagggctgcctcagctcttcagcccagaccagtgacagagctaccaacactgcttcacctcctgcagaggtagaggtacaggcaatgagaggagggggtcagggatattttttagccctttctcatcctaccctcatgccagtcccagctttatctacccttgagtcatattaagccattcaaggatgagtggatgaagtttttaatcaggaaaaaatacttccatgccccccaatttgagagtaagaaatagaaaatgaggctattgtgggtgtcatttctaatttctggacctcagcctgtaccctggggtaagtggaagtggaaaaaaactacaagaaaacagaaagagtggtggggatttgtaaggcttggatgagatagtatatattaaagggaaaacttaattactttacccttaagtgtaatgtttgctgtcacctttttgtatctttctctttttaatcagactgttgaaggtgtcttctattcttactttttaagagttctcttcttctattgcttaaattatgaatggatgttaaatgttttcaaatgtaatatctgccaatattaacatgattatttttattctttcatttacatcgttacagattattttattgtatacaactgtatacaaacttcatatggttcctttcatataataagaatgtaagctgtctgagggcaggaattgtggtctgtattgcttacagatgaatcctcaccctctatgtgtaaaatagtgtctgacatgtggtaggcactcaataaatactgaattaatgaatcaataaatagtgtcacctagatatttaagtgagaaacatttgatgtctaattaaaattatctctgttacaaattattttattaaattaaattaatttaactaaaattaaaataacgtgaaccaagtcatgtctagtaaattctcatcctcatgtgcgcaatatttataaattcccaggtggcttccattttcatgaacaccttaaattttgagtttccacttcaatacagtactctcactaacaactgcctaatgactttgtatttaaataaataaactcataactcagccctttaccttgctttctccacaaaaacactcagaaattgtcaattttgtattgtgtaacatactttcctgatgcactggcaaaagacaccactcaacatgaataccaaggaatcctgttatcaatgtcctctctcactccactgctttactcattcttctcgtcttctctagagttctgtgcatttccaaggcagagcagtttgaccatttcattcacacttttgactcctataaatgctttcaatttccaaaaaaaaaaaaaaaatgtatattctttaatgcccaactaagttgtggccatagaaaatgaggaacaatgaaaaaaatgcaagacagaaagtcaggagccacgaaggacagcgtgagacctctagataggagagccagggcttccagatgggctaattaatagactccctctactgccaggacaggggattcttacctttccttcccactggccttggttaattgcagtagaacagtgtccgctacatctcccttttttcttttcctcattaggagtttccattgtggattcccaattctcattgcatcgtggtatattggggctttgaagctaagtattcttttaagttatgggacacttatcacaaagaaacttcaacataaaacgttggggatctcatccttgggaaggatggctctacttcttctatttggaagaagagtgtaaagggatcttgagtacctgaaggcataattctggccaagactgacagctgcctaaccaacattaatcacccttcttcactgcagtgaatgcttataagggtctgttgcctcggcatccagtctaaatacaagcttaattttctcatacgaggctcagggctcagtcacccttgacacagtttccagttctacaccacagtcacgagtacaagaaaaaaaaaagaggaactttaaatttaagtactgggcagaatccagatctaggaaacgtaatcctagccctggaatacttactgatttatgaacaaacttctaatgggagggtgataaaaaggaaattaaatacatcatatgtatatatgtatataatattttaatgtaaacataggacaaataggtgaattatgtacatttaatatataaccgcatcaaaacaaagttttacaatttgatttgattgggaattcaaaattcatatattaatttttataccaaaaaaattatgtaacaaaaggataaaaaggcactgatttggttttgtgcctttacaacataggtactaacttaacttcaacaacagcaaaaatgctcaaattgacaaaaatttatggactttacattggggctcaaattatagttatatatgaggatctatcgagcacccgattctgtggctgttcggggcgccactatgtaacctgccatgatccctggtggactgaacaaaggggggtgaatgcaggaataaaagacaagagacaaaagagtatatttggaagaaggggtccgggggcaccttgcctctagtggacaaggccctgagctttacacggccctctgtatttattagagaaaagcgatagtgagaaggggggtggaagaagaggtcagttggttggtccagagtaggcttgcaagactgcattctctagatgttccagtagataacttcaaagagcttggcgtcaggaagcgattgccctcagcaaaccttctggcggcaggcacagtcgtgagtttgctcacatcctgtattcatgataaacagtttgctgtttgatcatatagcctccagtggaatgctgagttggtcacgtcccatgggccttcggctccctgcatatccccctgtttatgaattaattgaaagaatgtaagaccaggctgggcagctctcattctccgattggcggtccatccgattttacagactataaacagaagacagagacaaaacaacattactccaagaactacatataagatgttactgtggtactttagataggtccaagggttgaggctctccaggccttcctggaattcagtccagtcttctaaagaaggctgaaattcttgagtgtgcctatttaaatcaagaattttgttttgtaattcactaatatcaaaggtgatgttggatgtgaaagctccttgcaaatgggctttcacaaggtcccacggatactcacttttgttatattctaagttggttacacaaatacgagtgtgattaaaatgacagcgcaattgccgctgcaactgcaagctttatacttgttcccctaaccacagaaccatggatttcaacattgccacttcagtttgtaactcagtgttaattttattctgaagtagcctcgcttggttggctgtacgtgtccaattctctacgtactgagccgtttgaacagaactatgcaaagttacagaggacatcacaacagaagttattagtgtgaccaaggaaacgatagcaaaaattatcatgcctaaggctctacgggcacaataagtaacctgaagtagaagaagtttcacaaaatgcaaagcaggtgtggcagcccaagcctcggacagattaacaggaatccctagcccagggatgcaacctaaaatcatcaaagtcgagatattatgtgttcgcaatgtgctatgattaatgcagtgatataactggcaagatttacaggtcaactgggtattgtttacctggagctggtccttctgagctgccaaaaagacataaggattaaaaacacaaaccacaaattgagtggtgatattctttacaaatgtaacattaagactgtgtcgtgactccagtcggccttctctccatctttgcactcaggctcagctgactcatggctcgtaccggagggactgggcccatggttggccaccccatgtttctccagtctcccattccagggttgcaagcaccttgagggcacccacatggcttgtcaatctcctgtaaacacacaagcataccctcttccccatgtcagtaaatccaccgggcctttccattgtccttcttctggggatttccataacactttcagataaactttcctcttttcctctaacacttgccaatgtctttctgctggagtcttaccatccgtaccaggagtcaaaaattttaaagtaaataaggctaaatgtagttttgattgaggtggtagttggcctcctataccccctttttgtcttttcaacattcgttgtaatgtttgatgtgcccattctataatgccttgtcctctaggattataaggaattcctgttttatgggttatagcccaaagctgtaggaaattttgaaaagcatgactagtataagcaggtccattgtcaatttttaattgtttaggtattcccatatgagcaaatgatgacagacaatgtcgctgtacatgaccagctgtctcacctgtttggcatgtaccatgcagcatatgagaataagtgaaacaaattaagcagttctgggtctagcgtacttttaactgtagcagtttctatgcgaatggctaaatttacaacataagctgaacaagaagaatctccttgcagggtttggtaaagatgtgtaagttgataggtagcaatacctaacatcgggcgtagccaattaatatctcctaataattgctgaaaatcatttaaagtctgtaacctgtctttatggttgacaatgttgattgtagcctgccacgatccctgatggactgaacaaaggggacgagcgtgggaataaaagacaagagataaaagagtatatttggaagaagcggtcagggggcagcttgcctctagtggacaatggccctgagctttacacagccctccgtatttatcaggcaaaagagatagcaggaagtggggggggtggttgctggctagcagcctgattcacagcaggcttgcaagactgcattcttaaaacagtaggcgctagatttctcaatagataactctcaatagataacttcaaggagccagggagtgaggccctccacaaaccttttggtggcagcgcagtgtgagtttgccacatcctgcattcatgataaacagtttgctgtttgatcatatagcctccagtggaatgctgagttggtcacgtcccatgggccttcgggtccctgcagttgataggatctgaagctgtgagctgtaaaacctcacagctgactgcaactagctctgagcattgacctgaaaccccagagatccttattgtttgagtatgttttagtccatagatggcagcatgacctttggaagagccatcagtaaaataagtctgtccacctggaataggtttgtgatgagtaatcacaggaagaatgaaagaatggattttataaaactgtaaaattttgtctgagagtagtggttatctatcacgcccatgaagtctgcgaaagcagtttgccaggcagtcgacatttcccaagctgcagcttgttgctgagagtctaaaggaacaataattttgtcaggatcatatcctgtaagcatttgtgacctatgcctgcccatagtcacaatttgtgtaattaaagaaagataaacttgcaaggttttgactgtttgattagatagaaagaaccattctattactgttacagactagtctataaactggcccaaaagtcctgttggagagtagggggtaggaagaataaacaaaagcaaaggtttttgtggttgtagccatgaggcatgtctctgctgtaacatttgctctacaagctgtaatttggcttctgcctctttagttagttgctgcagggaatttaaagaatctccgtgcagggtttggtaaatatgtgtaagttgataggtagcaatacctaacatcggtcatggccaattaatatctcctaataactgctgaaaatcatttaaagtctataacctgtctttatggagaactactttctgagtccatacacttctctctgtaacaatagttcctaagtattggtatggggaagttgtttgtaccttttctagagctattttgagattccatttagtcaaagcctgctttgtttctctgaataactgatgtaggttttgatctgtaggagcagccaaaagaatatcatccatataatgaatgatgtaagcagtaggaaacatattccgaggcttctttaatgcctgtcctacaaaatgctgacatagcgtaagactgttaagcatgccttggggtaaaactctccattgataatgagaaacaggttctctttgattaatagaaggcacagagaatgcaaatcaaggcttatccttctcgtgtaagggtgtagtaaagaaacaatccttaagatctattactacaagaggccagtctcttggaatagccgctggagatggtgaaagtttttgtaaggcacccatcagttttatgtgtacatgaatagctcttaaatcatgtagtagtcgccatcttccggacttttttggaaaaacaaacactggagaattccaagcttatgtgtccggcatcccattgttcttttactagctgctgaagttgcatcaggttctcctgagataggggccattgatccacccacacgggtttgtcactgagccattctaatagtgaggcagtgggcagaggagaaatatcaatgaccctcgtcagaaatcctgacgtcctagcccttttctatctgtttttccagttactgatattgggttaggatttccttgaagaaattttcctaaacattttcccctctgatatctcatgttcttcaacattttaaatcctgggttatcaaagttttcatttgtaagtctcatattccatgttataagtaagtctcaaccccataaattgatagctatattttcaacataagactgaaaagtacatgactgtccatctggaccaagacaaggtaaaatctcagtgctctgttgaacactttgagctgttcctactcccactagggatgtagaagttaattgcaagggccaggatgggggccaactgtctttagatatgactgacacatcagctcccgtatccataagcccataaaatttctttcctttaatgtgtactacacaggtaggtctattagaggctatgggttgggatagatagatttctcatgtagttgtgctcccaacctctttattttctcatttctcctttcatggagaagggtgtgatttgcagggaataagcaataattgagcagtatattgtcccagctcaaaacccaaagatcttgtgacattaaaactacttgaatttctccttcataatcagagtcaacaacttctgggactacagtaatgccctgtaagttaaggcagattttgcctaaaattagtttcacatatcctgctgataaaggtccccaaatatcagtgggaactttgatgggtttgtctgccccaactaacattacccattctttgactgggagatctaatcctgcactccttgtgttcctggggtgagggaatcaatgtgcctctgggaacccatgcctggaacggggttgaggtctggactgggaatgccctcattgtttgtggggcctgggtccaggcccccatctcatttcccagcaggggggtgccattctgatgaaattttgagcggcactgattagcccagttatttcctctgttacgcaaggacaaagtcctggcattttttccactgggtggggcactgcattgtaaggtcctttctgtactgagatctggcggcattcctttttaaaatgtccaggtttttcacaattataacattttcccactttagggtttgacccttggctccttttagatttgtcaactgctaaattagccactgcttgcgctaatattgcaaagtgatgaagctcagttcctacatcttgacaagctctgagaaaacttcccaagttttttatacacctcaccagtgccagtgcatgtttacaatccgcgtttgcatcctcaaaagctagagttaaggttagcatttctgcagccgtggtatgaggaatctgacgcttcactgcctcttgtgatcttgtaagaaattgcacatagggttcctgtgacccttgcatatgtaaaaaggattgtactgggactccctcttcaggaattgcggcccaggtgcatttaacagcctgtgcacactgctgataagcagcgtctgggagtgccatttgactttccaggtctgaataagggccattacctaatagcatatcctctgtaatgtctccgtgtccagcaacatggttctgtttagcctggtctgcacacatttcttgccaatttaaattccatgtcagatatgcactagtggacaagcaagttcgcatcaagtgtctcacatcaaagggtaaaaaacgcatagcaccaaacacagattctagcaatcctaaggtcaaccggctctgtatgccattatttaccactctcgcttttaattccttcaacaacttactctagtggggtgtgttcatgaataacctgctgtggattgttgggatcaggccttatggaaataggaaaagtgcaaggtcctaggggctctccagctatggcagcagagcataaaattctttgtattggggtctctagttctgctaccaaaggaggcaatacagatgtttctgcaactggaggaggctgtataggccaatttttatcctccctctcctgttttttattttcatctggagctgtgagtgggacaacagattctttcagatttttagattcagcctgttgtcccacagaataataaggagataatggcagaagtacagtatgaactaaactccaagtggagaaaacagaaggatcaattttaagacctttttgatgagcccattttaatccttctgctctgtcccaattttccacatcaagggtgctgcctgtggaaaccatgggttatgtgtaataacctcctgcagcagctaagttaatgtctgagaactaacctgagcaccagtttgtttcaacagaactctaagcaactgcacataattatttttttcagtagacgaattctgccccatgttaccgtgattcagaaaacttcccattcccagtacttctttaaggaactgatcccagtacctctttaggcgctgacctcatgtgcgctgccagctgactcatcccagggtccccatttgcgttgtcaatttcagttcctctattccaggagatcttcttcattcacatcctcatagtcccgtgttcagactgtcgcctgtttgagtgccacttgtagagcccctgattctgtcgctgttcggggcaccactatgtaacgtgccatgatccctggtggactgaacaaagggggatgaacacgggaataaaagacaagagacaaaagagtatctctggaagaaggagttagggggcaccttgcctctagtggacaaggagctcggcaccaggaggcgactcgccctcagcaaaccctctggcagtgggagtagtcgtgagtttgcccacatcctgcattcatgataaacagtttgctgtttgatcatatagcctccagtggaatgatgagttggtcatatcccatggggtcttcggctccctgcaaggatcccactaaatgtactcactttgcccatattgtcttgagaaggcaactacatataaaattttgaaaaatgagtatacctcgctttaactacagccttgcctaaattacccatagtcatacctattgttctaaaatagcctatgttggaggtaggttgctctaaaacagaatatgttggaggtagacataataaataatacattaaaattaaagtaaattgtttgcacttagagattggcttgataaaatgggatcacttagtcccccagttaagatagttaatatggcccaacgtagggtgaaataatggccttcaataattaaaatttgttaaacaaaacgtgattaataaaagggtgactatccacattgcatctccacttaacagcccaaagtgcttcttgttcccatatctgaaaataaaaaatatcacaaagaatgtcttatgatggatgactacagcactaaggctgtagtcccatctatcagggcccccatatctaacatctaatattattaaaaattgctaatactattcaatcaagaactggtaaacattttgctctcattcatttggctagcatgttctgttaagtgcttatttctacagaccctcagctacagttgcctccacctctgaagaaacacaatacacctttccaggctacctaggggtaccctcatagctttggcatcacacacaagctttgcagacaggagcttaatgacatccacagtctccataagcacaggtgcagcattacattgaggacaacctcctctaagaagattcacttgatacacacattacagtcatttaattcgtctcttagtccattcaaggtactataacaaaatttattatgctggataatttgtaaacaacataaatttaggccagacgtgggggctcatgcctgtaatctcagcattttgagagtctgaggtgggtgaatcacctgaggttacaagtttgagaccagcctggccaacatggtgaaactctgtctctacccaaaaatacaaaaattagcaggcatggtggtgaacctgtagttctagctactggggaggctgaggtaagggaattggttgaaccctggagatggaggttgcaatgggccgagatcacgccactgcactccagcatgggtgacagagtgatgctctgtctcaacacacacacacacacacacacacacacacacacacacacaccccataaatttattgatcacagttctgggggctgtaaagtccaagatcaaggtgctagcagatgcagtatctggtgagggccattactcacagacagtgctttctatgagtcctcacatggtaaaagggaaagacaagtgcctataggactcttataaggcactcatcctacctatgagggcagaacaatcataattgaaaacctccaccttttaataccatcaccttggtatgagcaacctcatttatatttttatttttatttttatttttggcccagggaatgatctaaggatgtcatgtttcagtggtgaaagataaggacaggtcctgaagagactctgaaggagtctttataaaggaggatgggatgttttccttttttttgagacagagtctcactctgtcacctaggctggagtgcagtggcgtgatctcggctcactgcaagctccacctcccgggttcacgccattttcccacctcagcctcccgaatatctgggactagaggtgcctgccaccacgcccagctaattttgcttttgtatttttagtagagatgggttttcactgtgttagccaggatggactcgatctcctgacctcgtgatccacccacctcggcctcccaaagtgctgggattacaggcataagccaccgcagctggccgatgttttcctcctttataaaatgagacaggcatgtgaatgaagccagtttttttgtttatcttcatccttctggctctggagggcccgttgatgtgatgtccagaacagtggcagccattctgtggtcactttcaagaagcccctggaagaaagccaataggatggtgaagcaaagggcttaaatgaaaaccaatttttatttagactcagattctatctccttgcaaaactttttgtaatagtaaattccttcttggtttatgtgcttcatatgtttactatactttatcactgaaaacatcctttggtatagtgattcggggagaaaagaaaaaatagttgactcctgttttctgcgtctccacttgtcttcatggttgtgttgtttcagccggaggacaatgtcctgatgttgcttaaaatctcagaaagggcccatctcctccgatttagacctttaactcttctcagattaagatatttgaactaaatttgttgtaattttgtctattaactaatccttagagctgcgttgcaggtcccacaaattatctccctctggagcagaaggttaaggggttaatcttggtaatgatattggataacgggtactctctcatgcatctgcctcacctctcaaggtttttgttttttgtttgttttgtttttttgttttgagacagagtccagctctgtcacccaggatgaagtgcagtggtgtgatctcggctcactgcaacctccatctgctgggttcaagtgattctcctgccgcagtctcctgagcagctgggactacaggcatgtgccattctgctgggctaatttttgtatttttagtaaagatgggttttcgccatgttggccaggctggtcttgaactcctgactcgggtgatctgcccacctcggcctcccaaagtgcagggattacaggcatgagccactgcactcggcctaaaaaccactttttttgtttgtttggtttggtttgagacacagtctcactctgtcccacaggctggagtgcagtggcgccatctcagctcactgcaacctccacctcctgggttcaagagattctcctgccccagcctccaaagtagctgggactacagccgcctgccaccacgtctggctaattttcgtatttttagtagaggcggggtttcaccttgttgcccaggctggtcctgaactcccgacctcaaatgatccgcccacctcggcctcccaaattgctgggattgcaggcgcgagccaccttttatcacatctcattttatgttagtgaggttatttagggcgaggtcccttgataggctcaggttagggctgaccaccacaaaaatcaagtgactagagggttggagctttcagccccacccattgactttcaggaaggggaagtggggactggagattgagctctataaaaaaatgttggctgggtgcagtggctcatgcctgtaatcccagcactctcgaaggccgaggtgggtggatctcaaagtcaggaattcgagaccagcctggccaacatgatgaaactctatctctactgaaaatacaaaaattagccaggcatggtgatgtgcgcctgtagccccagctactcaggagactgaggcaggagaattgcttgaactgcttgaacctgggaggtggaggttgcagtgagccaagatcccgccactgcactccagcctgagggacagggtgagactctgtctaaaaaaaaaaaaggtagacaccaggcacggtggctcacacttgtcatcccagcactttgtgaggccaaggtgggcagatcgctttaagcccaggagtttgaaaccagtctaggatacatggcgaaaccctgtttgtacaaaaaattagtcaggcgtggtatctcacgcctgtagtccccactacttaggaggctgaggctggagaatcccttgagcccagggaagtggaggttacagtgagcagcgatcatgccactagactccagcctgggtgatagaatgagaccctgtctcaaaaaaaaaagaaaaaagaaaaaagaaaaagaagaagaaaaagaaaagaaaagaaattagccaggcatggttccaggtacctacagtcccagcaactcaggaggctgaggtgggaggatcacttgagcccaggagtttgaggctgcagtgagctgtgactgcaccactacaccccagactggggaagagagtgagatcctattaaaaaaaaaaaaaaaacccttgagaaatgagattagatgagcttcttgagttggtgaacacaaagaggtgccggaaggctgagtgcctgaagagagagcatggaagctccatgtaccacctcaacctctcccttgctatatacttgccctatgcatctattttgactgtttttgagctgtattcttttctccttttttttgagacagaatctcactctattgcccaggcttggagtacagtggcatgatctcggctgactacaacctcttcttcctgggttcaaatgattctcgtgcctcagcctcctcagtagctggaattactggcatgtgccactacacccggttaatttttgtgtttttagtagagacaaggttttgccacattggccagactggtctccaaatcctggcctcaagtgatccaccagcctcagactctcaaagtgctgggattactggcgtgaaccaccatgcctggcctaagatgtactctttagaataaaccaataaatgaaagcaaagtgatttattgtgttctgcatgccattctagcaaattacaaagctgatgagggggtcacaggaacccctgatttatagcccatcagtcagaagtacaggtggccacatgggacttgcattggtatctgaagtgaagacagtcttgtgggagtgagacctttaacttgtgcgatctgatgctatctccagttagacagcatcagaactgaatttcattgtaggatagacagtggtgtctccagagaattggagacttgctctgtttggaaaaaagcccacacatatgctgttagaagtatgtgtgtaaatagagaagtgagtttttgcttaatcatacatctttgttgtttattgttttcctctcattttttcaccttggtaattttttgtttcatttccctgaatctctgaagaagaaagggcctggactctcatattccttgacccttgttatttggagggatgaactccagtctcccacagaaggttagaggtgaaggaacattcagacacataggtttctaagatgagtagtttgatgacatctccaaggtgtcttctgggaatggtaagaaaccctgagtttctgtcactggattgattccagctccattgttcccttgtccttcagcaaagtctctgctgaagcctattatgtaaaaatcacaggacaccattggtttaaactgagctactgtactacactcaacaaacaaaaccaaaatagagtcactcatactaaagttctatgtcaccaaaccaaaaactaagttgtttatctggctttccaagaaatcataaagagagagagagagagagaaaatagccaaattcccaaacaggtcactttcagtagccatgaaaatgcctctgctttaatccttacaaaagaagtaacgtaagtaaccatgtcagtcaatctgttttgtttttttttttaaattattgtttccctattcccactgtatggaaaaagcaactttgaaatgaccattcagcttttttttctttgtttctgctttctttagccctcctctccctataaaatcaaacttctctgttctactcatcaatacaggcattctgttttgagggatgaggtgttgtctgattctagaattatgaataaagccaataaaaactttacactaaattagttgtaattttgtcttttgacaaatccttggagcttgtgttgctcgacaggaagccagggactggccacaagaaaaggaactcagctagtggtaagttggggtctggcaatctaaaaattattgttggaatgcctgctgtatgacagacatttcctaaactctggagcagggctgtgcgatgaagtatctacttgccaaatacagcttttttgttttgttttgttttttcagtcttttttttttcttttttcttttctttacttttcttttattatactttaagttttaggaaatgatgagttcacgtcctttttagggacatggacgaagctggaaaccatcattctcagcaaactgtcgcaaggacaaatacagcttttgagtgcttgctatttttctcatttaaccttaagtgtgctataaatataaaatgcatctcatgtcttctaagacttagtatgaaaaaagaacgccatgtatctcattaataatttttattctgattaaatgttccaatgataccctttttgatatataggattcaagaaaatatattattggtgttaatttcccaaatgtttcctactctgtttacacatggttacctgaaaactataagacacaaacacggcccgtgtttacagaccacattgtgtttccattggacagtgctatgctagagacacagcactgaaagaaggtgctacttgtggagtttgtatatcagtgcagaaagtatttatgatagaaaataaatgaacaaacaaataagaaaagcatctggtgacataggctggacctggggcagctgttttgcaaatgggttaagagaatacctctgaggacaagatatttaagctaaaatataaatattcagaaagagccaggtgtggaaaactccagaggaagatcatagtaggcagaaggaagagagaaagcaaaagccctgaaatggcaagaagctggcatggtcagggaatcaaggagtccaccatgggtccagcacagtgtgtcaggtgagagtgcagagatgaggtctggggatacacaagacaaatctcagggtgcttgagaagtgtgagttagaaatgtggaagccatagaagagtgctgagaagaataacatcattgtcttatttttccttttgaaatataatttgtctgtgtctggattttagcagagggaatagcaggaccaggaacaaactatctgcaaagtttgtacaaatatccaagcctgacagggccatggacatgggtagtggagatggagatggctctggctgtgcattcagcatgttctgtagatataatcaataggacttggattgtattgggtggtaaggaaaatgaaaggtgagttctacatttagagctttaataactgaatatttaaactccaaatagatacagaatattggaagaatggcaggtttgggaggaagggacaagcaacagtttagtttgggcaatgttgggtttggagtgtctatgggactgcaggggagatatcaagaagtcaattggttatatgagactagagctcctggggaggccagtgctaataattcagatgagaggatagcatggtactttaagctgtgatactgaatgatatcacctatagaatgtgggacaccctaaatttagagacatttagagcagaaaactggactgaaaagaggtggccaattgagctgtaaagacaaccaagagtggattgtgtgtacatcttatcatcttatgatatggaaaaaaaatgtgtttgaagtaggagaaagagatccagtggttcctatgtcactggaacatcaggataaaaactgagaaaggtccactggatttggcagtctggaggtcatgtgtatccttaggagagtgcattagctggagtgctaaggactaaagtcaatatagaatggattcagcagaataggtgaggtgagaaaaaaaaagcaagcaattagagacaaccatttctaaagtttggctaggaattctctttacagaaaacacttctcttaaagaaatagggttgaagcttggaaagaaatatgggccaagattggtttctttttaaagggaagggataggataatggttacttggtaacaagaaggatctagtagaaatcaaatcttgagggtttctttttagcagaaagcagaaggacaaataccatttcttgggaagacgagagacagtgggatggaaagcaaatgtaaagagggaagtcactgggaaaaagaagtctttattcacaatagcaagggcacgtaaattgagggttaggaaagaaaaggctaaaaaatgcacatctaattgttacagttttctcattaaaattcagccaaggccatcagctgagagtggaatagtagaggaagttggttagtttgaggagaaagcagaagggctgaatgttattttaatgcatcagaaatcacacgtgctggagaagcacagatgctaacaaggaagtgccgagtttccattatagattacattccaatctgtaatcatacatccagttgtacctctcaataattgtgacattgaacaagtcacttcccctctctgagccatggtttcctatggattatacaagaacaatatttgtcccagagcaaggatgttgtaattagaaataataaaatacacattggttgatacacattgggattgcaccaaatagcagccctcataatcagtacaggtatcatctctggtccacggttctcttctccactttgtaactagggtggatccaaaattttacaacattgtcttgttggcctgtccccacctgtcactgcacattgttggaatgtgtcaacatttccaaatgacttagagattattgatacatcatactgtctgaatgtcttctaggatatttggagagtggtagagaaaatctgagtctgttgaggaactagggaatgggagagggttaaccatacaattctgttgaaatcagtctgattgagctccaactctggttctacccctttctgactgggggctttaaataattaatgtaaccaatataagtcaacttcctcatgtgtacaatggttatactaattaaaactaaggttagtcaatattcaccgtgtctcaaggtgtgctcagtgctcacacagattaacacgtctcatctgcagaggctgtgagagcagttgttagggttaaaggagaagctcttggcatgtgagtaatgttcataagtagtagccactattgctatgagcattgttcttgtcctgaccttgagcttcaaaaggcacgacccaggattgagccccatgacacagcacacagcctggtgaggaccagaagttcccatttgtcacagacactcagtctagcctagaagatttccatgtccagtctcacttaatcctcacctgaaagttagacttcaccacaaaactgtccttgttctgcagaggagaaaactgaggctcaaagagatatcactgaccaagaacccatattggcaaggtgccaacgataagagtagcgatctaactgaccccaaagcccagtgttctttactctgtaacagtgatgctcaactggggggagttttgcctcccacgggacctttgacaatgtctatagacactttcagttgtcactcctgaagggggagttgctactagcatcggtggatagaggccaggggtgttgctaaatatcctactgtgcacagaacagtcccccacaacaaagaattacacagccccaattgtctgtagtgccaacgttgagaaaccttgagctacattaaacaatgtcccatgaaagacctcagtgaaagtgactggtaatgacaggaagaaaagaaggaagagagaaagggaaaggaggaaaaaaccatgatactagggtatgaccacatgctggaaatatctggggaactcctttcaaatgcagcattttagagttgcaacggtagtggctctaaagttgctcatcctgaatttcaaatcttgctgcctccactgaccggctggacatgatgctgaaaaaaaaaaacctacaaaaaccccaaggccatgaattccctctggtacaaaaaggggtaatgatggctgcccacaatgttattatgagtattatttgtgaacaagtgctgtataattgctgttacttttagagaggctggatatcccaaggtaggaagagtctctaattttcctggccataaaaatcactgtagcttttacacagagagattctagagttgggttcatgaatatgcattttaacaaataccttggatgtttctgatacagcccacagaccacagtataagcaaatttggtcaagtggcaaagacacaagggacacagagacctttgggttgagttggatgcaacagcttcccatgtgacctggtgcagaggcagggactgtaattttgtgattctgtttcttaaaagcaaggaaatagatcccagaaagatgccaggatatcctcccatagtgttattgcccagaatttagtcatgtttccaccaataaagcaatcccttgcaaagcaaaaggaattctagttagaacaaattagaaaatcaagatatgcccgcaaagatggaggagggataccttcccccaaaagagtgagtaactgaacaaaattgcgatttgatttgcagagaagaaatgaggaacagttatttgtggggggagggggcatcaccagcaatatctgtcagaattgttgcatagagaaagggcttagaagtcagactaagctagattaaagatctttgtctactgtttcctacttaagtgaccagcagatttcacaattgctctcaacattgagtcattcctgtggaaactacaaacaatgaatattacagagctactatgcagaccaaactacaacccatatgtagcaattaacacagtgaatagtctctgataagaaccctacaaatactagctaaatattcatgctcattctgtttatcccacagaccttgaagatatacaacggatgctaagtagggacaatgaaaagcagacgggagaaagtaaatatagggccctctttgttgacttcatctagcacagaatctataggatgtaatatatttctgctctttttttttgtggggggaaatggaatctactctgacatccagactgaagtgcagtggcacgatcttggctcactgcaacctctgcctcccaggttcaagcaattctcctgcctcagcctcctaagtagctggagttacaggctcttgccaccacacctggctaatttttgcatttttagtagagatggagtttcaccatgttggccaggccagtctccaactcctgatctcaagtgatccactctcctcaacctcctaaagtgctggggttacaggcatgagtcaccacgcccggcctatagcatgtaatatatgtctatatattacaagtaatggttcaaaatcctcttcagctaactcaatccaaaccctaaaacttcaaattaaatatcaactaaaaaataggtcaagggtcctcacagtgggagggacaggagctgggagactgggagagcatggggccgaaagaagttgcagagcttgccagcatgtttgcattgagtgatggaggccacagatgtgaaccttctgactctgagtcttgtgccttcctcacgaagctgaagctgcctatgctcaattttccattgtccatacactctcagttcagtatttccgctggtggacagagccctttaatcctcttggtaatcagcttgataggtggcatgcatattaataatgatgggaatatagagaactatcgtttcccaaaggaactccgagagagtgccaattttatgttataaccattcacaaggctcactggggagggtctgctggtaggaggaggagctacagtggaagttaatgaatagttgtattgtaagatggtgtcacagctgagaaatggccattgctgaaatgtttcaggtgtgggaagatggaaaccaacttctccattcctctgaatgaaactgaggaggtgctccctgagcctgctggccacaccgttctgtggatcttctcattgctagtccacggagtcacctttgtcttcggggtcctgggcaatgggcttgtgatctgggtggctggattccggatgacacgcacagtcaacaccatctgttacctgaacctggccctagctgacttctctttcagtgccatcctaccattccgaatggtctcagtcgccatgagagaaaaatggccttttggctcattcctatgtaagttagttcatgttatgatagacatcaacctgtttgtcagtgtctacctgatcaccatcattgctctggaccgctgtatttgtgtcctgcatccagcctgggcccagaaccatcgcaccatgagtctggccaagagggtgatgacgggactctggattttcaccatagtccttaccttaccaaatttcatcttctggactacaataagtactacgaatggggacacatactgtattttcaactttgcattctggggtgacactgctgtagagaggttgaacgtgttcattaccatggccaaggtctttctgatcctccacttcattattggcttcagcgtgcctatgtccatcatcacagtctgctatgggatcatcgctgccaaaattcacagaaaccacatgattaaatccagccgtcccttacgtgtcttcgctgctgtggtggcttctttcttcatctgttggttcccttatgaactaattggcattctaatggcagtctggctcaaagagatgttgttaaatggcaaatacaaaatcattcttgtcctgattaacccaacaagctccttggccttttttaacagctgcctcaacccaattctctacgtctttatgggtcgtaacttccaagaaagactgattcgctctttgcccactagtttggagagggccctgactgaggtccctgactcagcccagaccagcaacacagacaccacttctgcttcacctcctgaggagacggagttacaagcaatgtgaggtcggggatatttttgggctctgtctctttctaccctgcgttaagcggaaaaaaaaaattctgacagtgtttttcttcctctttcataccaccaccaccacaatcatcaacataaaggaagtctgtaccaaatctgtagggggtttttcccacaaccaagcaatagacaccagctgggtgtcctacaattaaattccaacactatctacctggagctactgtcagatcccacaggtttaagggctcattccccaagtctgctcctccagttgagacacaagtcacaaatccaggcttctgaaacttcggaccaaccagcttcaatcagggttcccactaccccctctttgggggtagagtggctcatggaactcagagaaacatttatttcggcttgctggtttattataaaagcaaggtttattataaaagatactacaaaggatacagatgaagaggcacatagggcaaggtacggggttccacgccctccctgagtgcatcaccctctgggaacctccgtgtgttcacgtctcatgaagctctccaaatccagtcctcttgggtttttatggaagcttcatgatgtcagcattctttcctccagtgtataggatgggatcctctctggggagggtcttaagacccacaattagaaaggcaagggaagattagagtcctgctttggggtagatgaaaggaaaggagagagattctgtttcctgaggcttaatacacccaacattataacaaaggactgtagcaagggctatgggagttctgaagcagaaaccatgggctaaaaccaacatacatcttaataccagataccctaatcccagtcctaacttcatttaaccttggtcacattgagtcattccaggatgagtggctcaagtatttcctcagggaaaatacttctgtgccccctgatttgagggtaagaagtagataatgaggccactgtgggtgttattttttcatgtctggacctcagcctatatcctgagactaagtggaagtgggaaaagagtacaagagaagagacaaagtggggatatttgtaaggcttagatgagatagtgtttttttagaaaaaaactttatcttaccattaagtaaaatgtttgccataggctttctggggctttctctttttaaagtcagactgttgaaggtttcttctattcttatttgttaagagttttcttttattgtttaaatcatgaatgaatgttgaattttattaaatgcagtttctgtaaatatt

SEQ ID NO: 215 - DNA, 25352 bp, Homo sapiens
cttccccttctctgccctgctccaggcaccaggctctttccccttcagtgtctcagaggaggggacggcagcaccatggacccccgcttgtccactgtccgccagacctgctgctgcttcaatgtccgcatcgcaaccaccgccctggccatctaccatgtggtgagtgtgcgggccccgggtgtgtgtgcgtgcgtgcttgtgtgagtgtgaatgtctgcggtgacccgtcatctacggagccccacaaatgaaagaactcctgctctccacctctctgggggaccctgggcaaatccctgtcctgctctgggcctcagtttccttctctgtcaaatggctgggggtaccctggggagatgccgcaagagtgaggagtaagggagctggaatccactttccaggcaaatgtaactgacgttcactccgaggctggctccgtttctgcctctgtgagatggggcacagcagcagccggaaggttatttgtgtgcaaagccaacagcagatgtgaaagtgctttggaaggcagggatcttgggaggaacgtgggctgggattgtttgaccgggatgtgaggtcggccgcagacacagccccgattcttcccctggggcctggagggagcctgggccactcgaggggatgagaagtggggatctcccctttgtgcctccagtggggaggcaggggccgtgtcctctcagcttccagctcagtcaaaccacggccttctgcccaccaaagagaacttgagacctgtgctaatcattagggtaacttgtccggcccaagctcttgttgggcaacttgtgaagtcacggctgtcactggttcctcctttcctggtgactcacagtgtggtcttgggcaagtcacagtgcccgggggccaaggctgcccctctgcctggggtggctgagggtcagtgtccttgtactgtcctgcctagacccaccctactcccaaactcctggccacactcatctcccctagacccaagcgacttcctcctggggtgactcagggcctgtggttaacagttttctcatgagtctggaagggcttcctcaaaattagcctagatccacatgctgcggtgggttgctgcaaactcagacctgcctgcgtctgcttcctgtcacaggcagggcaggcagagctgtggcaagagcccagccttcaggggggcgatgctgttcagtggttagcccacggcctctggatgcagactcctgcatgcaaatcctggcttccctgcttcccagctctgcagccttgggcaatttacttaacctctctgagcctcagttttctcatttaaaaaaatggggatgtgaattatcatacccatctgatagggtttgttgtgaggctcagggagttgatacatacaaagcatgcagaaccacgcctgacgcacaggtgagtgctttattattcgttgtgcatcagacatggcacctgctgtcagcatccttggagtcaagttgtcagattcaaggactctagttttgggaggaggaactcagaggttgtccttccgagctcctgccaatgcaagagctgagagaagcaaatcactctttgagtgtccctgtaccctgtattttaggccttcaagctctgagactatgcacattcttagaaggacagtgtggcatgcaggggcgcctcacaggtagcaagtccctgggtcctcaccccagccctgccactaactggctgtatgggctcagacaagcctctctctgggcctcagtttcccttttataaagtcaggggtaaggtgatgttgactggctcagaggtctccaactctgatgcctctagggtctgggcaggccatgtgagtgacagcagggggcagatggggcctgcggtgaccccgggagcccttgcttggcccaccctgcagctgttctctgtttttgcttgttgttgccacgaaggattgtgggccctggtggccgctcttctgatgtttagagaatagggagcaggcttttgtgtcacatcttctgatgtttcaatgctagtgattgatgcatggtagaaaaaaatctcagtgcaggccaagtcaaatccatttgcaggttgtgtgggcccagaggctgccctgcaaacccgggactgtggggctgttaaggtttcttgttgatcgtgccatccgatgtcctcacctgtaaatggtggtgtgatatacggtccctgctcacagagctgaagaatgtgtgggccctagcaatcatggaagacttcttggaggtggtgccattggcaggagggagagtttggttgtgggcagtatggaaggtgaggagaaacaggtgagcaatggcgtatgtgttcggcttctacagggacacaatagagacaaacctggagtttggggaggaggtgataaaggttttgagtgacaagctaagaagttggatcttctctgcagtgcaccattgatattttgggctggataattcttcatcttgggggagtgaattgtgcgttagaggaagttcagcagcatccatggtctctacctactagatactagcagcactgcccatctccctaccctgccacttgtgataaccaaaaatgtctctagttatggggcccaatctctcccagttgagaaccaatgcctatgagtgatgagacgttctagagcaggagcaagcaaaagagcagaggggtgtcctggaagctgtgcgctcggcccaggttgtctccaggctgtggtcctcagttgactccagtggggggttatcttcctgcaccccgaaagagtcctctctccttcccagaaagggcagggcctgggggctttcccataggctagctggcaacaggtgtgctgataggaccttgagcatctggatggaaaaagagaagctgtggtccagatgtgtcaatagcccatgctggctgtcatctggacccagccatgggtgacgactctgcacatcatgagctatttgtggacttggcccctctagggagggttaaattgagaccttgccatcctgagacagtgccacgctctattgagtcatgagggcgttattacatgagggaagcctggtccgtagctttgggctcgggcatcttcctcaggatgtcagtgggtttgtgtagaggattctctgggtcacccaaacttgcacactttgggaacccagcaaactttctttctttttttaaaaaatctattctttttttcaaagttcagtaacttgcccatcttttgtggtttgatttgttttgttttgtttttgtttttaagagatggggtcttgctctgtcacccaggctggaatgcagtggtgccatcacagctcactgcagccttgaactcctgggttcaagagatcctcccacctcagcttcctgagtagctaggatcacaggcgcatgccaccatggccagctaattttaaatatttttttttgtagagacagggtcccactatgttgcccaggctggtctcaaacccttggcctcaagtgattctcctgccttggcctcccaacgcgctgggattacaggcatgagccaccgagcccagtctagagaaatttcttaaattgggtctcttgggtcctggctttttgtcaacctgaagcacgttctaagtcgatggtagaaagtggacacccccagaagacacttttgcccagaaatctctttcttcctgacccctcttccccagagtgcccggaattccactgtcagaaatgcattgtctgggttaaaaaacttaacacctgctatgatttcaacagtgtcaaaacaggatacgtcaaaactgggcgaggaggaaatgtatttgggttctaggatagtgaaagctctattttttctacttttctgtattttccatatttggtacaatgagcacgtacttagaacggttttagatttacgaaaatattgcaaacacagtacagatagttcttgcgtcccccatgcctagttcctctattgctaacgtctcaacgttagtgtggtgcgtttgttgcaatgggtgaatgaatattcgtgggctgttattaaagtcagtgcttcacccctatttccccagctttcctcttacatcctttttctgttccaagattgcatccaggatgccgcgttacatttagtcttcacacttccttaggttcctcttggtatgatggtttctcagatttttcttgtttttgataatcttgacagttcgaggagtatttgtcaggcattttgtcaaatgttcttcaactggggtctctggtggttttctcatgattagtctgggaatgtgcttttgggaggaagaccacagagatgatgtgccagtctcagaacatcgtactaagaaaaggttctgccaacttgacttaccactgttgctggtgactttgagcccccggctgaggttactcctttgtaaagttactctttttttctcctttccatgctgtatgttttagaaggaagtcactatgctgctccaagcaactcaagtttgatgaatggggagttccgccccacctccttgagggcagagtagctacataaattacttggaatttctcaaggagatttgtctgtactcccagtttattatataaataaatgatttatttatattacagggacccagggatctttactgtatgctttgggttataatccaatggtactttactttgtggctcaagtatactacttttaaattggaaaaaaaaaaaagtacggccaggtgcggtggctcatgcctgtaatcccagcattttgggaggttgaggcgggtggatcacttgaggtcaggacaaaaccctgtctttactaaaaatacaaaaaattagctgggcatgatggcgggagcctgtagtccaagctacgcgggaggctgaggcaggagaattgcttgaacctgggaggtggaggttgcagtgagccgagatcgcgccactgcgctctagcctgacagagtgagactctttaaaaaaaaaaaaggtaaagcattcaaatcatagtatttgaagaaggagtctctattgccctgacctcgtgcaggtaagttcacccatgtgcccagccccaggccgggatacagccctgactcattcacggcctctgcccttgaggggccagtctgccaaggaaaaaccgacgaggacaatggatgacattgctggctatgatgggggcacagatgtagggctggaggttgggattctggaatagcttcttggaggaggtctgagtcttaaggatgagtagggctttgcttgggcaccttggaaaagaggtcacgctgggcggggggagtagcatgacacaggcttggaggggaaggaccctgcagtgcttcagagacctagcaggtttgtcaagctgggttaggaggggtggccacgaggtgtgtcggggaggagggtggagaggtccccaggggtgggacctgcccgagtcctttgcttttacaagcttcagagctaagaagatggatctctcttcggcctatcagctcattttgcagatgggaaaacaggtccagcagggccccttacttgctccaggacacatggagagatggggcaggagcttgcttcaggtccccctgctggcacacaggtgtgtggaatgatccagaaagtgggcaaatgagttccttccctgccccatggctggggtggtgtgtctgtctgggaggccctgccctcatccagcctcccaccattcatttcttctttatggtccagtttacgggaagcttcctcctccaggaagctctcctgatttgtcctccttagaactcctggggctcttttctctgctccactttgggggcagtgatttgtgattgaaaggaacacaggcccatctccattacttaccagcagtgtgacttgagcaggcgggcacctttgttatctgagccttgccttcctcatctgtaaatggggccagtggtccctgcctcaaaagtgatcatttggaggagaccctagcgaagccgggtggagggctagcaggtgagtgcctgaagtgggctgtggaagaagaacacaaggccccccgccccttttttttgagactgagtcttgctctatcacccaggctggagtgcagtggcgtgatcctggctcactgcaacctctgcctcccgggttcaagtgattcttgtgcctcagcctcccaagtagctggaatcacaggtgtgtgccatcatgcccggctaagttttgtatcgttaggagagatggggtttcaccatgttggccaggctggtcttgaactcctgacctcaagtgatccaccagcctcagcctcccaaagtgctgggattataggcgtgggccatagtgcctggccccactcctctgttgaaagttcatctgtttggggttgaaaaatgggtccaaactgccaggtggggaaaaccctgggtgagaatctgttagaacttgccacctttatgtccagtgcccctgggctggacagagaggccacgttctctgccactgcagctctgtgcgcttcacggaggggtgaggaggccggtgggggcagggtgggagttgtagcccctcctcagtgtcagaactgagttgttctcctcacctcaggggtgtgaaccccagcttctaaaagcaggaggcccccatggcccatcccacccagagagtggctgaagggcctagcctggcctggccgagacttctctgttgccaacctggccccgaggcctccaggaagtgaggcttttattttgagcctagagcatcagcctggaaccaggacttcgctctgagctcactgtgaggcgagcgttggtttcccaggggaccccaccctgccaagggaagtggcacaaagcaccccctaatgaggcaggaagcaaagccatgagctgcactgcctcagccctgcacaggggctgcttgggacaaggcacccgtcccccagcctcaatttcctccctggtcaagtgggattcagtaactaccatttgtggcaccggaaaaatggcagctgccacgggggcctccattttacagatgaggaaacaggctcaggagggcaagtgactctgcagcctgtgttagataaagaacccgagcccaggtgtctgctccaggtggaggcagggaaggcagccttcctggcagccatgggatgggggagggggtcagctctgccatccccagagccttgttctgagaagcacagagcccatgtgtaaagagctgatttcaattttacctgcaaaatcagaaaaatatgggactcatgttagaacctgtctctcaagactggcgcgaggttgacacgagagagtgtatggtcagtcggccctccctatccgcaggttccacatcgtggattgcagattgaaaatactcagatgcagagcccgtgatacagagggccgactgtataagttcagaagaggacctggcgtctaataaatgcacaacaataatagtatcaatacttattatcactattgtgggtctttgctctgaagataaagggagaagtgatggttttagggaatcgtttggggagtggagggtgcttccccagatatctaggaagtggagaatgacagggccttgtgtcatacctggaggccaactctgagccccccactggctgctcctaaagggagatttgataagctaccaccagccagaatatctctgctgctgggattcactggtactgtttgcctttggggcaaagttagctgctagcgcccagtcacagcacttcctgtgctgcaggtgacaacctcctccagcgccatctgagccgtccgagtctaggttctctaggttttgcatgagccgtcacatctcctgcatgctctttcccctttctctctaaccccagaggccccacccctgccaaaccggtggatccgtgtgttcccccagccaactgctgccatttactgaggcctgctgcgtattcagcacatggatgacgccaaatcacagtttactaagaggaacgtcttgccgtttcctgaatgcgtctcatgcacactggcctctgctcatgccctttcctctgcctggaacactttttccattgctctttcggggaatcttcttcaagatccacctcctctgagaagcccgccctgacccctacggttggaccctgagctctgggtgttgacccagagccctgtgtgctgggtccctgggagtcgtgccctctggcctggatgctcgtttgggtcttgacccagcctgattcatcttcatgatcccgtggaacctggcacaggaggtgccagccaatctctatttgatttttgcaaaccttttcttgatgtataatttacctatagaaaagcacagctatcttaagtgcacaccttggtgggcttctacaaggtgaacacacccatgtgacctccacccaaactaagaaatcagaccagcacccagaggcccctagagcccccgcctcgccactgccccgcccccactgacttctgcctgtctatgtagttctataatacatacatctgtagaattacgtagaaatgaaattctgcagcgcgtgttcttttgtgagcacttctttctcccaacgttatgtttgggagcttcgtctgtgtggttgcgggtagctaactcattttttccattgctgtgtatactccattgtatgaatctaccacaatgcatttgcctgttttcctgcaaaataacatttggattgattccagcttggggctgttacaaataaggcagccatggccaccaggctccgtgctgggtgtccacacacaggcacctgtgctgctcagttgatctttctgaatcactgtcttcaatgatttacttctcacacccactccaggaggtggatggattcttctctcccttctacagatgaggaaatgttacagatgaagtaacatggccaggccaggatcccacaggggatcagcggctgcactggggttctcactgaggtctgtgagccccagagcccagtggagggaggaggggatgaggtggaggcggcgggtgaggacgagaactgcggaagagtgaagaggagagagaagccaggctctggggagctgcaggcagccaggccgggctgctgcggagtgcgtggccccaggaatgggggcgtctggtggtatctgggctggctggagaggtggttggggagatagtgctcttggggggctggcccccactgagccctcataagctctgaccagaagcacagggtggggaaggggagcttcctcttgatggtgacacatctgactcccttctcacatcctcctcccaggcaacccagggaaatcagggtgggcaggtgaggttgaggggactgagcttcagggaggggccataataataatgatgatggcagaagtgtgaggctgtaggacacagggtcagggtggagcagccctgagggggaggggcaagggagggctctggcacttgggacccatatggcaaactgcattgtctgttgggaagggttgaagacaagcccgggcctgtcttcttgtgcagcctctgtcctgggctcgcacatttggtaggaggagccaatgaagtaaacggataggaaagtgtccacactctggctggcacgggtgtgtgctcactgacggctgggtcctttctctataacctttacctccctgaaaatctcagatggtgggtctccgcctgcctgcttctgagacggtgggtcctgggcctcagggagtgagagagagtgggcctgctctcctgcagaagggactggtctttgaaccccagaatcgggggttcttgtgtcatcaccaccatccacatgatattccttatcaccatcctatcctgatgtccccattgccgtcacccccatcactgtcaccaacatcaccaacagcatctctgatcatcactgtcatcaccacgccaactccaacaacatcccaacagccactccccgcctcacatggtcaccatggccagtgcctcccaggtgacacctggtgcactgttttcaccgcatcccctctggtaccgccatccttattgcccagccatgttcaatactgaccccattgtccccatcttccctgatttccatcctccagcccctgcccccattcttttagctcaacctgttgcttgctcctcagagccaccaggaaaagaaacaaatccccctgcccctggccacttccccaactggccagcttggggaagctgtgtttgtcattaagaaagaaaggctgcgtgcagacgggaataagaactgaaaccaaagatgggcagaagaagaggtgaaaagcgggaaaggagagtgggggtgggaagggtggctgagcatggctgggaccgcagcctgagcctggcttggaggcaggaggacagagctgattttgaccctgcgacagttttggtgtgtgaccttgggctggtcgctgtctctctctgggccatatttccccgctggtaacatcctcctctcagggaagagacactcccgtgccttctgagtttccctgaagggactgaaacacacctgcaccaccaggcctgtggcttttgcacatgatgtctgctcttttggaatgctttcttctcttctgtgttggaaaactcctacttgcccctcaaagccacgctcatgggtttcctgttggtgaaattctccctaagttttttagacagcaatgcgctctccctcatcaaggaccccaagccccatgcgtgtcctctgtcatggctctgagcacaccattcatgtatcgagttccctggagactgtgacaccggcacgccagggtcagtggcttttctagacagagtttggaggcggtaggtgctcagagagtgtttactgagagtcagtgaatgcccagaggtagcaaaaaccaccacccaattgtgcttgtttatggtgcacctgctgtgtgcccggctccgcgcaccacacgattccatttgacctcagcaatcctgtgaggcaggtcagtgattatccccattcctcagatgaggagccgaggcccagagaggttagtggctggctcaagggtgcagagctcggctggggcctggggccatctgaccccagcacccgagctcttatcttcatgatctcaccagcatagaatgaagggacagtgggtgaaaagatgctgtaattggggagcaagtgggtgagggcatgctgtctgcctgcgcattgttgggggagagaagccttgtacctgtcatgggatggctcgggtcccaaggtcacagcccagctgggctctcagagcttggggagaaggcagcgctgtgtccaggtggaaaccggggacatgaggggaaggcaagggcttggaggcttggaaatgttgactgtctgcatactctgtaggtcggccaggtactttccaggaactaccaacagctgttggttagggacatgggtggggcagtgagggccttctgaggggcagggtgctggccctggggtggctgggggtggaggactgtgggcagcctgggtgagatgtcctacagtgtgtaggagctccaccccactgaccctcctgcgttctgtcatcccaatggccccaggggaaaatgagggtctcttctcattgaccagaatcgaaagctgaggccagggagaagccagaacctggccagggccacacagcagtgaggcagtggaggaggcctcctgctccccagctcttgtctcctgagctctgagtggctggggctggggcttggttgccagggaagggtgggcagatggctagagagatcctggagcctcaggggagcaagttcaaccttgtggggagccctgaccccaggagagaggcaacagggttcacaccccagccgggccacgtgacacaggacatgtgagttctctctcagcctccatttcctcatctgtaaaacgggaaaatgttgcctgtcttgtaaagttttgggagattgcagtgcaagcctgtgcgtgcaggtctgagcacacagtaggtgctgaataaatgtgagttcctctccatcctatgtcctagagagccacatgggtgcctggagagccgagcttcctccctttctcctgggtcagggcctggcatcttcgtggaaggtcggggcccctcagagtctaagtcaggctctgaggttgcctcgctctgtgactgtgggctggtcccctgccctctatgagtctcgtgagccatccggcaatggggacaaagtcctccctcgtcccctgccgcagggttgttgagaaaaggtgaaatgggggagggtgagcctgggttttaaatgcaggtggttttcacaaaagtagaaatacctctggtgcctggtgctggggctgaggggagggaggggggactgcagagggagaggggatgggggcgcctctctgcctccactgaggcactgaggggaagggttaggccttaggcagagcccgggtggctggaagatgccgggcagcggagggaattggccaagatttgaaccctagccctgcatatgaccagctgggaggccttgggcaaggccctggacctctctgagctgcactttcttcgtctgtgaaatgggaaggaaagtattaagaatagtcccttttctgggtagtggggaagatcatgtggcatggagttaggctgtacaaatgtccccttcttcccctggggtgattggaggggttacagggcagtaagggatgcttggaggagaacagaggagttgtagggggagttgaggattagtagaggtctctaaagtcgggtaatgtccaaggtgacctcatggcctcaggaggacaatattaaaatttctaaatttttccatcatataattttttaatttctggaaattttttagtagctgttttatgatgttcatgataaactaggacagcaacacatgcgtgtaatttagaaagaaagaaaaatagaggcgtgtgtgcaaaaggttttactgacatagatgcatgatcaaaatatctaagtcctctccggggttcaggctagcagggctctgaggcattttgggggtcaggggaatgggaaggcatcagaacagcactgggagacttgggctcctccctcaacttgctgtgtgtccttgggcaagccacctaatctctctgagtttataaaacaagcagaggaagcttataaaacaagtacatgcaggctccttctagcaaggggaggttgagatgatctgattctaggctttgttccagatctcagataatcctggaatcttgagactttgaaagtcttctcatttcacagctggcagatgctcatggtccttctctaagcccagctgtgactcatctgtgatctgcttacatactcccaggaacagggagctcaccacttcacaggacaccccgttctgtgctggacggagctgtcatctgcctccctttctctttctctcgttcaaggtgaaactgagaggagaggggctgcggcctggcctttaggggctgaggaaggagtttttttctctcagggctgtttcctgtgagtgtcagccacagccctcaccacacctgccttctttttggggtgttctcaactttcctgatgagacaaagcctttccagctcactctttagcaggtagagggggcagttagagcatgcaccgtgctcctggtactactgccgaaccacgtaagcttgccccagccaaaagcagattctgtttgctgggcaccccctgccagtccctgagctcagtgctttgcaaatataatgcaatttaatcttcactaaatccagtgattgcaattttccagatgaggaaactcagagaggttaagagacttgcccaaggtcacacagtgacctggattcaaaatcctcttgatctgattctggagcccagctcttcatcactcttccgttcagtccctttccacgcccctaaacaggatgtaatgtggcaggaagacaagttgagacctgtgtctgagctaaaaaaaaaaaaaaaaaaaaaacccacacagtcagcaagggggaaacagatggtgggtggctggttgcctgtcagctgagcatgagttaccagtgcagggctgcctagaaagccgatgtaaacttagggccatattaatagagatagggcaccgactagaggggaggggacagttttcttgttctttatatgggcagaggttacctggagaactgtatgtatgtcataggggaagggtggagggcttgctgtgaggacatggacacacataaggttgtgagttccccatggctggaagcacttaagtagaggctgcatggcacaggtttatgggaggcatggataaggtgacctccaaggttctttaaaactgcagttttgtggctgaacttcagttgtttctagggccaccccaacactcaggcctatcagattcgccccttccacatcattcttagcaagggtcatctgagagtgtggggttcatttgttcattcattcattcattcattcattcaacaaatacaacagctaggggaatgaacaaagagacatacaggctttccctgcctggaacctacagtcgaatggggataatggataacagcacagattgagtgcttactatctgccaggtactttaagtgaattatcccatctggccccaccacaatcctatgaggaagatgttattgttccctgaggggccatgggagacagagattcagggttagatgctctccagggccctcctgggcctgtgttgatgattccgggaacctgaagctctatggtgctctctgatccccagagcttgttgttacagaaggggatgcagtggaggggccttcagcttctaccccccaccccacctctttaagcctgaccttcagtagtaacagttaccactcttcctgagaactgggcctaagggctctcctgggatagtctcatttactcctcacagtagcctcctaaggaagttactagtattatccccatcttgcagatgggaaaaccgaggcacatagaagtcaagtagcttgcccagggtcacatagctggagagaggaagacccaggattctgaacatgggctctctgtgtgtaaaggccactcttttgtctgagatgccctactgacctggcatgccatctgctccaggatccccactactggcttccctgctgtacaccactaaggtgggaggggctggtcggggggccgtgatgcaggctcagctgactgatgctttgctttgcctccagatcatgagcgtcttgttgttcatcgagcactcagtagaggtggcccatggcaaggcgtcctgcaagctctcccagatgggctacctcaggatcggtaggtccaggggacgccggtggagtggcggggggaggaggacagggagggccctggccagggatagccaggctagtgttggaggcactgccacctctccatggacgatggatgacctctggcaagtgtcttcctttcttggggcctcagctgtttcatccgcaaatggggatgttccacctgaccccacccacatctgcaggtggtgagagcagatggaatggcactttgcaaatccccaccagctggtaaaggtgatagcctcactcttctgcttaaagccgtcagtggctgctcatcacactagaataaaatggaaactcctcaccataggatccagcctctgcccacctctctgacagcatctccctgcgattctccaccccacaccttgctccagccacactgacctcaccaaccctgtccctgtctcaggccgattcctcattgctctcaggccactccccagggatgccttcctcagcctcaccctggctgaagtggaccccagcctgcacctccagcccagcaccctctgtcgcatcctcctgtgctatgtgtgatgttctgcttttgtctttgtactcactccagactcaggactgcaagagggcagggcctgggctttcctgtgcatcctcatgtccccaaaccagtggttccccaagtgtggtcctgggagcctggctggggtcccaggggcacccctgagcacctccctgctctccttgcctttcagctgacctgatctccagcttcctgctcatcaccatgctcttcatcatcagcctgagcctactgatcggcgtagtcaaggtgagggctcaggagccccgctgccccctgccccttcctgttattcacacccactggtggtgggcagtgctgggtgctgagagggtgggaggcgggtatgttaggcggtcccacctgcgttctggagatcttcacacataccttttggagaaccatgtttctccctgagattccctgggcaggtgacctcagttccctggtaacatgagcctccacggggccgggcatggtgggctatgctggtcaccgacactttggtgagaactagctgatgactcacatccttttaaacggcaggtggaagcagggaattttgagagtgaaaagaggaagtgttgtttctgggggtgagagacgggagaaagcactggattttgtaatggatgagaggagccgaagaagggggaaagtaggatgcatgcagctctatccatgcagtgacaggagccagcaccctgagggggacctacgccctggaaggcccccagagagctcatgatctgattggggaagatgggccttcagagagacagggacagtctagtgtgacaacgaggggctcctgggcccgaggcaaatctggtgggagagttgagatgggctgtagctcaatcccctgcagaagaggaacccgcggtccctgggtccccagaaaggcaggaagccagggcctcaccacatagccatgggagtaggatccagaaagagggtccttcctgtgcagacaggggcctggcccttgcagggccggaggagtggggcgatgatttggtgctggtttggaatgcgtccaccctgcctcaaatgccagcacccactccccttgctaacactcactctgtcttggaacccatgctgcctggggaggccgtttgccttgtgcagggtggctgtgggtgcttgtgcagaaactcaaagggttcagctagagaaatggagaaatggagcaggtggtccctgaagactctgagatcagtcaagattgttctggttgcctcctgagtgattttagacgaccacatgagacaccaggaaaccactgttgcagtgattttgtccccagctgtgagagcatatgaatgaatactggtcatggtggtcacttgctttcaattgaagaagagggacttcagcctcttcctggcagggcctcttactgtgactttggacccctgggagtggctggtggaggaaggtccaattgtatgcggggcgtggtggggagtggggggtgggggggaggggctctctgctgcctccgggccttcactcatgttggtctttctgcctccagtgccccgcccctccctcctgttcactcctagtctccttccccgatctagccctggtgtccccacctccagcaagtcctctctggtcccctctcctctgtaaaaagtgcacaaagcccttccttgctgggttcttgtgagcaaattgagtcaaatcctgctctttgagccctgatagatggggatggttcccttacgtctcctgggacaccaagactcctctcattcagggcctgggtcttatccactccctgtccccagagtgtcactcagagggaggtgacctcaactgaggagggcagggaaggtttgggagagggtgggaaggggatgcatgaggatatcaggctgggtggcggagtgttggctgcatgcaggggacacttgacggtgctgggcctacctttcagaaccgggagaagtacctgctgcccttcctgtccctgcaaatcatggactatctcctgtgcctgctcaccctgctgggctcctacattgagctgcccgcctacctcaagttggcctcccggagccgtgctgtgagtacccagcccccacctctcaccggacagcagagcccaggtctggcatgggagatgggaggggaccagacacgggccctgtgctcaggctggggagggtaggagccctcttcctggctggtgtcttgacccagtctctgagtccctccacattgccccaagtttcttcctctgtggaatgtacctgcaatcacatctcatcagcctgccttatgagggttacatgaggaacacacacattgggggtgcagcccatggtcagcactcagtcagtgctgctgggagtgaattgacacctgaggaaaggacatgtgcgctttttagcccccagcccccagtattatttcttctttggaaccaagttgaagaaaggaagagaaggatgattcatgccagtgagcgcccactgtggggtggcttgagggctgctgccagtcaaggacacagtctcccaaacctgcttttctcactctccccaactgttgtccttgaagagaccggggggctacatcatggaagggccctggcccgggagtctggagaccttggttctagtcttgggtctgccaccagctcttggtatgaacatctgtgtgttcatgtctctctgtgcacaggggacgagagtcactgatgtctgtagctgagacggtctctcaagtgagggcctactatgtgccgctcagtaactgggactttaattgctgctcctcattcctcctccttgtatttgtcctccccagagctcctccaagttccccctgatgacgctgcagctgctggacttctgcctgagcatcctgaccctctgcagctcctacatggaagtgcccacctatctcaacttcaagtccatgaaccacatggtgagtctggggcagggaaccatgcccatttgctggctgtgtggccttgaacaggttacttcacgtctctgtgtgtctgtggtttaggccaggttccctggagttggagcttgggaggaagattcttgtgctggtgatttattgagggagccctctcaggaagaaacttgtcaggagtgaggaaggcaggttcgagaaaaggaggaagccaagcaaagaagcaaagatgtggctgtaggagcagccctgcatgatcccagagagggctttggcatgtgaattgcaacacagacataatatcagtttttattgttgtctaatgaattatctctaagcatcatggcttaaagcaataaacatttattatttcacacagcttctgaggatcaggagcttgggagtggcttagctgggttcttctgactcagggactctggtggggctgcaccagagatggtacctggggctgtggacaactgagggcttgattagatctgaaggatgaactcctggtggctcactcacagggcgtgggctctttgcctaattcctcatcctgtggacttgtagtagtgctgcttgagtgctctcctgacatggctgctggcttcccctgcgggagtgatgtaagagataagcaaggaggaaaggcagtgtcttttaagacttctatcacttctgccacattctgttagttagaagtgcgttgctaagtccagcccacactcaaggggagaggaaataaacaccacctttagaagggaggcgtctcaaagaatgtgtggtaatatttgcaaatgaccacagaggcagtctcacctagggcgagttcccctgcatcagtcattggtttcaagctgcccctaggggagggaatgtaacctcccaggtattagtggattaggtggtccctgtcagccaaaatgatcttgtagagaagagcataggtgtggcccatgggcagctgacacctgccagctggggatgggccggtgcgccagcctgggaagcagatctggagatagtagccacttggcttttcttggtttgcccgtcagtgggatggggctgaaggtagcacctgcttcctaaggctgctgtggcggtcgaccaaggtgacggctgtgccacgctgtgctcgtgtgtgtgtggagggtgggatcattattcccggatgtgtgggtgctgttggaattccttatgtccagagacattgatgtggcccccaaatctgttgcagaattacctccccagccaggaggatatgcctcataaccagttcatcaagatgatgatcatcttttccatcgccttcatcactgtccttatcttcaaggtgagtggatccctgccctgcggctctgggaggggtggtgaggctgtgctgggcccaggcctgcccatgccaagctgttagaaggcagggacatgtgtcctccatgcctcctctcctgcttttagctcctttctcttgctttcccatgccagctcctctgactttacttgggatcctccgagacagcccatttagggcatgtgaatccgtaaaggccacctgcgttcagatgtctaattccagctgtctggaattagatttggactggcctgcgtttgaatccaagccccactgtcactagctgcgtggttggtcttcagcaagtcacttctctctgggcctcaggggcaggagtcttgttttgcctgtgttacagttttatgtaattcaggcatcaaaatgtacctgagattatgttaatagaggtttggtgatgagaaggcaggaggggaatggtctcattcttctctggggtggtcaggcccagaggatagggtccagcttcaggtcccaggtctgagtgatggtgaagcactggagtgtgttcacagcagtacaaccagcaacgtgaagagacaagaaaacgctgccatcttaggaagtcaaaaaacccccacaaaacccaacaaagacctgagcgtttattcagcatggaaaatagaggactcaagggggacctgactgctgtttcttaatacctgaagaactcttgtggggaattttgtgggatcctagaggccacaatgggggcctgtggcctgaagccacagggatgctgatgaccacagaaggaagggcttttaaaaagtgttcttttctgattataaaagtaacataggtcatagtagaaatttaaaaactacagatgagctggatgtggtggctcacatctgtaatcccagtgctttgggaggctgaattgggaggattgcttgaggccaggagttcaaaaccaacctgggcaacatagcaagattctgtctctacaaaacataaaaaaaaaaaagttggatgtggtggcgtgtgcctgtagtcccagctactagggaggctgaagcgggaggatcgcttgagcctgggaggttgaggctgcagtgggccataatcatgccactgcactccagcctaggcgacagagtgagaatctctctctaaaacaaaaaacaaaaaccaaaaaactacagataagtagaaagaagacaagcactccaccatccacaccccacacagagagcatcactgctgacaactgggtgcatttccccccagcctttctgtggtggtgggtgggcatctgcagaccccagctcctgcttccatctgaggccctgggcagtctctgctgtcacctaatgccaacctagaaacagaaccttgccccttttagcatcttctccaaggactgacctagcacaaacgcactagtgagtgtacagtgagaacacccctgaaggcctcatgggggaagccagtgtgggctttccatggcactctctactgcaggacccctccgcagaccccagcacacagctccgtcccccagctccccttctgttttttatcctccagaatgaggggcttccctctttgaccctcattctgcctctctggccccctccaccgacttgattttccctgggccttcatgcttcattctttgtcactccgtacctccatatgtctccttgccccacctatgtgcccatcagggaatccatcaaacaagaccttccagtacaggaccctctcctcttactcagggggcatcctgggggttttctgttgtttcttgagcttgccccttgggattgtatgccccactctggaaagcttctgcccaattcttacattaacttgcatcagctgatggacatgtactaactgttcctcctttataaacatggaccaatactgcacatgctgttttgtaatctgcttcagaaaacaacatatcggaagcaattttgaagaaaacatgtcccaccatcagctctgtttcgagatgggcagggctgtctcaggaggtagtgagcttccaggcagtgtgggcagtcaagcaggagctgtgggactattgccagggaaattggagggtgggctagaagccccccaaatccccttgctatgtggtatctgtggggcaatgaaaagggcaatacctggaatattctggactggctggtgaggaacccccaaccagaatgagaggtccgagcaggagcagctggatgctggcttctggagagagtggtggctcctgcctggcatatgtcctaggcctgctggagcgtgagaaggacgctcagcaaagcacagcctgacctgggcctttttccaggtctacatgttcaagtgcgtgtggcggtgctacagattgatcaagtgcatgaactcggtggaggagaagagaaactccaagatgctccagaaggtgagtgtggctgcaggtgggtgccagccctgtcactaactccctgtgccatttgggtcaagtttccttccctctctggaccttggtttctctatttgtaagatgagggttggaacagaagaaatgtgttctctttcagttctggtagtctaagattcattcactcactcattcatttattcagtatttactgcctctcactctttgctagtctcatatcgattccaggaggcgcagagaaaactaagatgccacctctgccttagaggagtgtacagttcagacacatagatacaattacaacttggtgtgaagcacagggacaataagcacagaggaaggacctggcctcttctcaggtatcagggaagccttcctggaggaggtgacagttaactggtcttggagggtcaatggatatgagatagctgggaaagcagaaggaggctttccgggaagagaggatgaggtgtgcttagaagcagcttattggaaagtgacggtttaaattcctggtaacttactttcctcacctgtaaggtggagattgtattagctaagacacttttggttgcaagtggcagaaacccaactcaatctgacttcaggaatttactagctcacagaacttagcagccaaatgtaggtctggcttgggcctggctgagtcctgacatcaggatatgatctcgtcctctccaactcttgactctactttccttgatgttggcttcattttccggaagcccatcccttgtggtggcaaaaaggctgccaaaacccctaggcagatatcccaccctctcagaaatcccaacagaaaaagaaggtcccaggagtatgtctgattggaccaacttgggccacgtgcctatccccaaaccaaggactatagccagggggatggaattctactttgagtggccaagtccagccacctcgctggatctgagggatgggaccagttcttctgaaggtatatggactgagaatgttttcccaaggaaaatggtgcactgttttcaaaataagggggacttgatgctgaataggcaaaggcaaatatgtccactacagggctgggaactgcacctatctcatgcaggcaatgtctagcacatagcaaatatccaagacctgccagtcattatcatcatcattttgccagaggtgggggtttgggtcccatgaccccaggttggaattgcaggtcattcttgaccatactcagccctcatctctctgtctctcccaggtggtcctgccgtcctacgaggaagccctgtctttgccatcgaagaccccagaggggggcccagcaccacccccatactcagaggtgtgaccctcgccaggccccagccccagtgctgggaggggtggagctgcctcataatctgcttttttgctttggtggcccctgtggcctgggtgggccctcccgcccctccctggcaggacaatctgcttgtgtctccctcgctggcctgctcctcctgcagggcctgtgagctgctcacaactgggtcaacgctttaggctgagtcactcctcgggtctctccataattcagcccaacaatgcttggtttatttcaatcagctctgacacttgtttagacgattggccattctaaagttggtgagtttgtcaagcaactatcgacttgatcagttcagccaagcaactgacaaatcaaaaacccacttgtcagttcagtaaaataatttggtcaaacaacagtctattgcattgatttataaatagttgtcagttcacatagcaatttaatcaagtaatcattaattagttaccccctatatataaatatatgtaatcaatttcttcaaatagcttgcttacatgataatcaattagccaaccatgagtcatttagaatagtgataaatagaatacacagaatagtgatgaaattcaatttaaaaaatcacgttagcctccaaaccatttaattcaaatgaacccatcaactggatgccaactctggcgaatgtaggacctctgagtggctgtataattgttaattcaaatgaaattcatttaaacagttgacaaactgtcattcaacaattagctccaggaaataacagttatttcatcataaaacagtcccttcaaacacacaattgttctgctgaagagttgtcatcaacaatccaatgctcacctattcagttgctctgtggtcagtgtggctgcataacagtggattccatgaaaggagtcattttagtgatgagctgccagtccattcccaggccaggctgtcgctggccatccattcagtcgattcagtcataggcgaatctgttctgcccgaggcttgtggtcaagcaaaaattcagccctgaaatcaggcacatctgttcgttggactaaacccacaggttagttcagtcaaagcaggcaacccccttgtgggcactgaccctgccactggggtcatggcggttgtggcagctggggaggtttggccccaacagccctcctgtgcctgcttccctgtgtgtcggggtcctccagggagctgacccagaggtggaggccacggaggcagggtctctggggactgtcggggggtacagagggagaaggctctgcaagagctccctggcaatacccccttgtgtaattgctttgtgtgcgacagggaggaagtttcaataaagcagcaacaagcttc

SEQ ID NO: 216 - DNA, 31970 bp, Homo sapiens
gaggctgggttatatgatctctttggctttagggaattactccataccagctctgagatttccagctcagcgatgcccccaggtccctgggagagctgcttctgggtggggggcctcattttgtggctcagcgttggaagttcaggtaagccagggctcaggccttgggaggaacttatttcagtcagtgatcatatttctccaactacttatgcagtactaacttttggaagatcccctaaaagccttttgcctcttctgaggtgaatttaaaacagtaggggaaaaaaaccccttttatcataatcggaatgatggtaaacaggtcacaaaacctgaactttccctggttatccgactcatttttctaaagcccacataaaaaaaccctttctcaccttgcacaagccaggaccaactgtaagaaaataaaatttggttaattctaagatattcatttttcaccccataaatatccaccattccaagatatatttaattttaaaatttaggttttccaaactaataatgattttgtcactgagattgttagatgtcctttctaatccagcaacctaactcaagtggtttgtcatcctggctgggtgatgggaactagtccctgctaacctcagatgcccctgggaaaacttccctcagatgccaatttgcatttacctttcccccagtaaagaactgacccactgatccctcttgcctaacagaaaattaacctgctctactttgggttctcagaagttctcagaagactccttctcactatggtgaggtcacccttagaaaaatcccctccctctactcacaatagcaggctgcttttctgtcttctccgctggacatttaattctcattccctggctctagaatatgtcattgcttctgcctggggttgctcacatcacctttggattgatttctgttctttgcatctttcaagggggcttctgtattcctatctcccttgtactcattctttttctgctcagcacccctccctgctacaaagttccactgggtgactgcatgctctccttgcactcatgggtggtttttcagaggtgctgttgagctctgtatgtgctttctcctacctcaattagttgtccctaaaaggtgaggatttgaggcttctgtctcttttagcatagttagtgctgtgctctgtatagagcagatgtccagtgaatattgcagacattgatgcttagaggaggcaatgggctgagctgatggggaataggctctgtctgggtcgggctaacccagactggaatcctggctctgtttctttgtagctatgtgaccttgaggaagtggctttctttacctgtagctagagatgatccttaccagataggaatgctgtaaggactgaatgggatcatctgtgcacagggcctgacttttgcagttgcttattcctttgtgattttattattagcaaattgttgtctaggctgatggaagtggagggaacagggctgtcatgagccaccttggagagaaggtgggaggtatcacctaggagagctgtgggtcccgttctgagaagtgggcttggcaggcccactttgtccctgctcaggagccccaggcctccttaggggctggaaggcatttgctagttgtcctgatttgaaggttgaggagtgggaggactatagcaaattggcatcaaactctttttggaagctcatctgtcggtaagcctggggcctctgtcacacagataagagaagctcagaaattctgaaccagatagcagggttagggtcagcgcagaagctgatcaggttccagccacatatgtgggaatcattctagatgctctgggcaggaagtgggcttataataacatgttagcagggcctgggtatttccttgcctggtcttcttgcctttgtttgtctctggtgtctttcttttcacacttacccagtgaggcattctctatttcccatccgcttctcttcctttcccaccttaactgagtgtttcactgtcaacagcaacaatatttattaagttaatgttccttattcttacttttagtagtgctgtctcagaaattaagtgagttgatggataggcagagatagaagtgtgtgtgcgtgtgtgtgtgtgtgtggctgggagggatagaaatatgccaaagggaaaaggaaaaaggatgtaattgacttcagacagcctagatgaagtaggtggacagaaagaagatgccggatgcagagagctcaaggtaaaggaaaggaagagctcaaatgatcgggagggaggaggttcaggaggtatccaggtgcctgctgtcacacaagggcagtagctgacccacatgggcctcttggaagttcagcctccactcactttcctggctgtgtacccacacaatctttcatgacaaccccagtcacacctagtttttccttggactgtggagctttagattgttgagctccttgatcaacctggcccttgagcttccaggctggctcaggcgtcctctcctccaggtggatgcacaagtcttcctccatctggggtaggtggtctttctttgtgttctctcagtacctatgtttcctggtcacagatcttacatccctatttgctgtggggcctgcttattttccctttctccgctagactttgagctcccaaagggcagttatggctggcgtcttcttcatccttgaatccccagagcctcacccaggcccaggcacacaggacacattcaataagccaaaagccttggtaactgagaagaaagaaattgagcgggctgcagtcctcatctctacttcctgacgttaggcagattgattaaatgacactcatcctgaaacaattcagccaaagaagggttccagagggtggcccatttcagagacactcctggctgctgatgcctcaatccacaggtcatctgatagcacagctctgtctgtggggagcccagggctcaagggggtggcaggaagttcagtggcccatagtgctgagctggtggcagaagcagcctgtgacaccagcctctgtaaggccagcctgggcctgaaggtggtgctgcaccctgcatgcgtggcagagccaccctcaagtcagctattgggagggggcctccgccctcctcccctcctgcagtgtcttcccgaggagcctggaggagggtgcctgcttcccgacacatgcaccgatggctcctctgtcatctccacatttgataacaaagtgtctgatgtggttttgtgccaactctgtcactgccagaacacccttcccttcttggtccaggccacagaatcaaaactgttttagcaaaataacacttctacgaaacaaaagcccatgggggataccgatctacagaacacacctgagacaggtgcaggtgggagtgcagagtagcacatttccagcatttgcagatcacagaggccacccatgggaaccatgagcagcccaggcgggtgaagggagctctgtcatatatgcctgagagtcactttccattatggaaacatgggtgttaccaggccttactcacccttctctaacacttcttcagtgtcaaagactcaagaatagaaaactataggctattttcagactcagacaagccagtatttcattctgcacccctcatttctattgtttataaatctctggtcagcctggccagatactcatgtgtcactgttctttggttggagtggtggctaggtagaggcagtatctgaatatgcttccctatttatcagcttcaaatactggcaattttcttctctcccttttcaaactttataacttttatcccattgcattgtcttgtttcagtggttaggactaggtcctctagcacaatatttaatagaagcagtgatagcagacatttcttatctgttccctgttctaaatggaatacttctaatatttcccagtaaatctaatccttactgtaggcttttaggagatatcctttcttatgttaaagagggttgaattttgtcaagtgttctttttttctgctcatccgttgagatgagcatatggtttttcttctttagtttgttcatacgtgaattatattaatactttttttaatgttaaaacagcctttaattctttgcaaagaattggcccagcaaaccttgctgggccatgatgtactttgtggtcttgttatcctggatggatttagatttgctgatattttatcttagatttctgtttatgtttataaatgaaagtagcctttagtttttccttctcccctgtcctttgcacttttggtacttcggatattctcatagaatgaactggaatcctgtctcccattttctattcctggaacagcatgtgtaagctagggatcaatagaattcctctgtgaaactctcaggcctcttagacttttctgagggatagttttgaaactagtgtttcaattcctttatgctatagttttacatttgattttctgtttttcctttcttgactaagttttggtaagttacgtttttctaggaaatgatccattttctagcaaaatatcagtattttcagttttggggtggatataaacttttttatggtgtaaggaaatctactgtctgtatttatataccttttttattcctgatattgtttacttttaacttccctttgttctgttactctgtcttatcaaaagtacatctagctcattattcttttcaaagagccagttttgggtactggctctttgtgtgtgacaggtactattttaggcagtagagtgaacaaaatggattttaaaaatccctgctttgttcaaaagtacattctaatgtggactgaccactaatagaaaataagtataataacttggcaaattccatagtagattagaaggtgatgattgctaacaaataaatagaccagggtaaggatgattgagagaaatgaagtgaggaacacaagcaggttacaactgaaataggatgtgagagtagacaagagagcacttgacaagcaaagacttgaaggaggggaaggaactgccatgtagatacataagggaaatgcattccaggcagaaggaacagccgggcaaagaccctcaggcaggaagccatctagagtgaggaagggcaaggagaactactggctgcaatagtgagtgattgtagcataaggcaaaggactcttggagtggggtggattagctcagttagggccttacagtccattgttaggacttcaggtttcaatctgagagaaaaggcttggagacttttgcacagagatgtaacatgacttgactgacttaaaaaaaaaaatcgtgactgctgtgttgcaaatagactgaaggggccaaaagagagggcaagaaatgcagttgcaggctatggcagtggctgtgagagatgatggtggcttaggccaaggtggtgagaagggttagattctgaatatttcattctgatggtcaagccaacagaacttaccaattgtatgtgggatgtgagagataggaaagagtcaaagatatcccaggcaactttgcaaagcctgagaaattgtaatgactaagttgctaccaatgttgctcatatttccttattttctatttcttcaatttcaactattacctttatatttctttccctatattttatttggaattactgtggtattcttttctgagttaaaatattagcttatctaatctaagtctttcccttctcccctcccccaccaacatttgcatgtaagttacacatttttccctattaaaaggtaaacttaggcacattaaaattttaaatagtttatttgaacaaacagtgatttatggtttgggctgcttcacactgcaagtggctcagggctccaccaaagggatgtgaagaataaattttataaggtgcctatgaatgaagcaaggcaaagaaaatatttgattgattaaagtggagcagtaccttaaggtccctagtcagaggttagttggaagcttctgagtggtaaagcttaagcctcagtttcctaggacacagctcttcactatgagttggggtgtggtgagcttctgtaggaactcaaccactagagcttcctcagtctaatggcttcccaaagaattattttaacaacccaagtgctgttttagccactctttgcaagttttgatatgtgctggttttattgtcgtttagtttttaatattctgtacttttcattgtgattattctttaacccatacattccttaaaaggttaaaagggtgtttttctgttggtaggagtgtaaattagtatagccactatggagaatacgatggaggctcctcagaaaactaaagatagaacttccatatgatccagcaattccactactgggtatatatccaaaagaaaggaaaggaagtcagtatatcaaagagatatctgcactctcacgtttatttcagcactgttcacaatagccaagatatagaaccaacctaagagcccatcaactaatgaatgaataaaaaaaaagaagatgtggtatacatacacaaaggaatactattcagcctttaaaaagaaggaaatcctgccatttgcagcaacatggatggaactggaggccattatgttaagtgaaataagccaagcacaggaagacaaatatcacattttcacacatatgtaggagctaaaaaagtggattcatgatgatagagagtagtagattgtggctctcagaggctgagaagggggaaggagttgggaatgaaggggagaaaagaatatacatgtatttattaccactgaactgtacacttaaaaaaggtaaagatgataatttatattcttttacctgaatataaaaaatttttaaaaatcttgaacaagcttcagcaatatgtgtccatgaggaattgtgccaaggagtttctctttgtaatgggctggtaaaaataccacaggcacatgggatgggcttgtcctattgtaaaaaaatggagggggtgtttttacatgtccaaatgtatattaaaataatttttgttattgatttctagttttattacattttatttagatgatattgattctttggtgattatttgggcctgctttgtgacatattatgctcatttaaaaggactcaaactctctgatggatgcaggctgccctatatgaacaatagagcagagtgactcattaatgtggtttgcatctcatgctgaaacacagtcttttcatcttttctttaaagagccaaatgctgggggaggctgataaaatgatggagtcaggcattagctctctcatgtgctgtgggagttcaagccacaggctgaagagcttagggccggcactctcagagtgggcttcatcccaggagcctccaaacctgcctgcttggtctgcctctgcaaggggattgaggacaaagtctggggctcagaagcagtgatggggaaacctctagtctaccacagcgatgctccagaaggcctcatggcttgaggtattctccacaggtggggttcccacaattcactcatagcaccatatcccagagcatcccagatccacactcctgttgtatatgagctcccagttacctctgatagaagataatcactccagaaatctaaagttactgtcttcctcaacaaaggggctcacacaaaccgaagtctgcaatctggatgtctcctctgaacctctgattctgtgaatcactttgtctggtggcagcaatgctgtgtgggactgtgttctgcgggtcagcatgtaccctgctgctcctgccagtctccctttgggatgcatggaagtcagggaccacacctctgcatcacagaagtggggatcggggtgtgatgctgggtgctgaaaatgggccagattttcagctccctgggaagcaggagtttcatgttgccttttctgttcagtgttttttaaaggcctgcagttacctttgccagagaatttccattgtaaaggtatctattgcaaggtgctgtgaagtaggtgagacttgtcaaggctcttctctgtcatctatctaggctatgggctgggcactggaaggctatggcagggctcttgactgctcataaggacaagaagtgattaggtggggctaaagagttgaaaatccttccaggagggagtgttcagactagactgaggctagtccgcagggcaactgttcatttggctgcccagggttctatttagaattctctactagtttgctagggataccataaggaagtgccatggactgggtggctagaacaatggaaatgtattgcctcacaattctggaggctggaagtctgagatcaagatgttggcagtgttagttccttcagggcaatgagcaaaggatctgttccaggacactgtccttggcttgtagatggccactgtctccctatgtctttacaacatcctccctctgtctgtgtccaaatttcctctttatataaagataatagtcatattgatttagacccactctgttggcctctttttaacctttgtgaagaccccatctccaaatacagtcacattctgaagtattgggggttaagatttcaacatatgaattttgggggatgagactcagttcagcccggaacaacagccatttcaccatggcctttaatctcatctagttgagcaatattccttctctgctattttgtccttaggcatgaaaaatattcacacagcttcattacagaagtgatgaaggctgtaataaatgagtgattattgcactagctgatgtataataaaccccatgcctgcaggcccctgtttcttgcttccttccaaggtcatctttcttccttctaagaacagatgacctcaccttggatgttgcttgttttgttttgttttcctccaggggatgcacctcctaccccacagccaaagtgcgctgacttccagagcgccaacctttttgaaggcaccgatctcaaagtccagtttctcctctttgtcccttcgaatcctagctgtgggcagctagtagaaggaagcagtgacctccaaaactctgggttcaatgccactctgggaaccaaactaattatccatggattcaggtgggagttaaataaccaacaggacttctcaactaagaatgatcaagtaaccataataccataagaagttagtgggcaacaaggggaggaatgaatttaccaatggccacatgttccatccctcatatcctgctgtctttgatggggtctcatgtcaacatgcacacatggtgttcattcttattggtcatatatgttacttctccacccagtcttgtctacacactcacgaacagtacatgtctgtgactggacaaatctccgtacacagaacctttattacccaggattgtatttcccttcttcacttcttccttggttttatgacctaagaaacttccatttatgggtgctacttccgtcatacccagaggttatgggtgtgatggagctatgcacgtctcttcttcaatttctctgatactctccagtccacaatttgttgtaatatatagtcactgagtctcaattccaatcaccatcctttctttgaacagcttttctccaaagcccatctatagggctagaaacagagaaaggtttctgggaggaaagagggagagaatatggtaaagtaatagcactatggagcaagtagagttggggcacccaatgaaaaggtagacacaaaggctgtgcacaaaggaccaccatttcctgatctctggcctgtctccgcctctcaggtccctggactccagagactcagctacatgtttccttaggcatctctccttgctcttgtgccaaaccctctcctctagcacatctcatattccaccactttccaaggctgagtgtgtacctccaacccaggggtagctaatagaggtggagagctcatcaggcaaggcactctgtctgctcttaaatcccacaaccccattccctggcacacacccagtccgcgctcctctgtccacacgagtgtgctctctttgcttctatactgggagtcatcaaaaaacttatttcctgatcccaatctgttgggaaagatttctaaacatttttctatcattttccttttcctggaaaagtcccactatacagtaagttccagaaggacagggactatatcttatttgtctttattttttggaaagcacctagcatactgcctggcccataggtactcaataaatgcttgctgaataaatcagtgggtgaatgagagaaagaaagggagaaggaaggaaaaagaaagagaaaggaagaaaggaaagaaaagaaagaaagaaagaaagaaagagagagaaagaaagagagaaagaaagaaagaaagaaagaaagaaagaaagaaagaaagaaagaaagaaagaaaaagaaaatgtccacaaagaaagagcctatattttagaatgagaattaagatcgcaaatcttaactctagggcataactctagggcatatttcttttccacaaataacacaaatggagcaatgcaatgtatacagtttatgtggtttatgccttgtgcaaaggtgcctgacaaaaggctgatgaggctgacatccaagctaagttctgaaccctagcatgaggctgcatctgcctggaacaaaaggcaaagttttataatttacacaaagactgcatatgtgctggcggaagggctggcaactttggaattgtgtcctccctatgctccaagtactgtgtaataaactcctcatatgagcccttctctagttttgatttcttttctgggtttgagattaatagaggtttccatgacaatgaatatccacttggcaggtaatttttccattcttttttggccccctgtctagggttttaggaacaaagccttcctggattgacacatttattagaacccttctgcgtgcaacgaatgctaatgtgattgccgtggactggatttatgggtctacaggagtctacttctcagctgtgaaaaatgtgattaagttgagcctcgagatctcccttttcctcaataaactcctggtaggtgcagaagagcttagggtgagtttgggctgcgtatgaggagagagggtcagaaagacaaaagcactgcctgaggaggcttagggtggaagcagagtcaccaggtagctcggtggtcttgggttcaaatcttgactttgccactcacagcactgacctcgggcagcttattgaatattctgagcttcccactgctcctctgtaaaatgtgtcgtggcactttagacagcgaatgcagatggcctggcacttagttgtccctcaagagagaatggccatggtcgttactcacatactttgggcaccaaaaggagagtaagggggttgtcagggtggggagcccaggaagagaaaaagtgattaacaatgagagtgctgtcctttttccctccaaagtaagtgtggtgggtgtgtcatgcccagggcctcggcttctgaagctttgggggaaagcctgccactgtgaagccagcagactctgtggcccacggggaactcactgttcctgctcttctaggtgctgggtgtgtcggaatcctcaatccacatcattggtgttagcctgggggcccacgttgggggcatggtgggacagctcttcggaggccagctgggacagatcacaggtaacattcctccctgcccatcctccaggctttagagatagagaaagcttgccctgaaaatatctcttctaaagcaagcagaggggagtacagagcctttgttctcacgatcaagtcacctattaccactaaaatttatttattgtggttcttttgcataaaatggtattgtgttattattgcatgatttctaatatcaatgtgagaggccatgtatttcttcttttactttttatttttaagtttcttatttaaaaaaacttttagattcaggatttacgtgtgcaggtttattacatgggtgtagcatgtgatgctgaggttcaggtttctaatgatctcattgcccaagtagcaatcagtacttgataggtagttttgcaacccttgtcccttgcttttcctcccccttttgaaatccccagtgtcaattgttcccatctttgtgtccatgtgcacccaatgtttagctcccacttataagtgaaaacatgcggtatttggttttttgtttctgcattaattggcttaggaaaatcacctccagctacattcatgttgctgcagagaacataatttcattcttttttatagctgtgtagaattccatagggtatatgtaccacagtttctttatccagtctaccattggttggcacctgggttgattccaagtctttgctattgtgaatagtgttgcaatgaatatactagtgcaggtatccttttggtagaagaatttcttttcctttgggtatatatctagtaatgggattgctgagtcaagtggtgattttatttttagttctttgaggaatcttcagatcgctttccatagtggctgaacttatttacattcccaccaacagtgtataagtattcccttttctctgcagccttgccaacatctatttatttatttttcacttttttataatagcaattctgagtggtgtgagatggtatatcatggtgtgatgattagtgatgttgagcattttttcaaatgtttgttagccacttgtatgtcttctttcaagaagtctcttttcatgtccttcaccctcattttaatggggttatttgtttttttcttgttgatttgttcaagttccttatagattctggatattagtcctttgtcagatgcatagtttgtgaatattttcccccattctgtaggttgtctgtttactccattggttgtttcttttgctgtacagaaggtctttagtttaattaagtctcacttgtcaatttttgtttttgtttcatttgcttttgaggacttggtcataaatgctttgcctaggctaatattcaggagagtatttcccagattttcttctaggatttttacagttcgaggtcttacatttaagtctttagtccttcttgagtaatttttgtatatggtgagaggtaggggtccagtttcattctcttgcatatggtcagccagttttcccacaccatttatcgaatagggtatcttttcctctaaaaaaagtgttaatttttgtcaactttgtcaaaggtctgacggctgtaggagtgcttctttatttcaggggtccctattctgttccattggcctatgtatctatttttgtaccagtaccatactgttttggttactgtaggcttgtagtatagtttgaaattgggtagtgtgatatgcccagctttattctttttgcttaggattaccttggctatttgggttctttttttgtgccatatgaattttagaatagatttttataattctgtgaaaaatgacattggtaatttggtagggatagcactgaatctgtagattgctttgggcaaaatggatattttaatgatatttattcttctaaccctgcatagaatactgaatactttggcaaatactatgcaaaaagcatagaatacctttccatttgtttgtgtcacctatgattttttttttagcagggttttagagttatccttgtacagatcttttgctgttttggttaggtgtgttcctaggtactttatttttgtgtgtgactatcataaatgagattgcattcctgatttggctctcagcttgaatgttattggtacatagaaatgcaactgacttttgtacattgattttgtgtcctgagactttgctggagttgtttatcaggtctagaagtctttggtcaaacctttagggtgctctagaatcatatcattgatgaagagagacaatttgacttccgcttttcctatttagatgccttttatttctttctcttgcctgattgctctggcaagcacttccccttttatttctttctcagcctcactttctacatctgtaaaatggttgtaacagcccacatctccttggcccactgtggaaataaactttagacagttttgttatatacatgtaaaagtgtggaggactttatgcttccagagccactctcagttaataagggactggagttgtgtagcaaaaaccctcagcttcctagccttttggtgggataattttgggtcttgttttacagaatctcaaagaggtgccccattggggtgagagcccatggggataacctactcactactattttcctttattctctgacctattttcctactccctcaccatgctttctgagactttttcccaaatctactttgaactcttgtggcagggtctgctttttgtagggggaagggaagggatccaaactgagagatgggaatagtagtattcacagtaatcactgtgttatgatgaggactagagtgtgtaaaactgcccggcataaggcctggtacatagtaactgctcgaagaaatttagctattgttattactacatgaaggtagtaacaagctttacattacattaacttctatcaaataattggtgttatcaaggtcatctttttttttttgagatggagtttcgccctgttgcccaggctggagtgcagtggcgcgatcttggcttactgcaacctctgtctcccgggttcacgccattcttctgcctcagcctcccgagtcgctggaactacaggcgcccgccactacgcccagctgattttttgtgtttttagtagagacggggttgcaccatgttagccaggatgatctcgatctcctgacctcgtgatccgcctgcctcggcctcccaaagtgctgggattacaggcgtgagtcaccgcgcccagcctcaagctcatcttagagccagagaaactgggtcattgagaggttacctctagagagacaacagagagtggggtttcctgaggaaggtggtcctcagctaattctcccaacccttgggtcttttctgggagggtctatgatctgcactggaagggtgggtgtgtggtgggtccatgaatgttcctgcagctgagaggaaagaggtccctcatatcagtctcttctcacaggcctggaccccgctggacctgagtacaccagggccagtgtggaagagcgcttggatgctggagatgccctcttcgtggaagccatccacacagacaccgacagtgagctggggtgaccttcctgggatgagggaatgagctcaaggcagcgcctaggaggctggcatctagctctgtggccctgggcagagatgccctgaccctctctgagcttctgttgcacagtgaagagtttaccaaaatgctattgaaagtctcttccagctctgtctctgaccactgaggtgaatggttgtatttttagctactgtaggcaagaggattctcatttatagaccaaaagtatttggttatgagcctcactttctgattcaaatgaatgcagtaataacagtgtgctgagcagtactgggtagggcattgctgcctggctgacttacgggaaagtcatgaagattttttaggatgggtgtgcctggtcccaaggtactgggccattccactccccaggcaggcaggcctgtcacaacttccctcctccccagatgacaagcttggcccttcagtccagtggagaataagaatctctcttccgggccgggcacggtggctcacgccagtaatcccagcactctgggaggccaaggcaggtggatcaggaggtcaggagatcgagaccatcctggctaacacggtgaaaccccgtctctactaaaaatacaaaaaattagccgggcgtggtggcgggcgcctgtagtcccagctactctggaggctgaggcaagagaatggcgtgaacccgggaggcagagtttgcagggagccgacatcgcgctactgcacgccagcctgagcgacagagcgagactctgtctccaaaaaaaagaaaaaaagaatcccttttccaatagtgacaggcacaggaaagactccccatctctcaacccgttatgaccaaattaagtccttctgaccagttgggaaaggcgggggcattcctcttcatgtctgctccacggcaaatgcctgtggggtctgtgcttagtgtggtgggtgcagggagaaataacatctgtccctgaccagacaagcttgcagctcaagttagagatgtccacatctcatttcctgtggtcagaagcctctttttagcatttaagactcatgattctgaaagaaacacatgcagttgtattgtccaacccttcttcccacctttatttcacagataggaaaccaaagcccacaggcctcttcctagctatgttaggtgagttaagcttgttcatttaaaaagtgaatcctggtcgggcgtggtggctcacacctgtaatcccagcactttgggaggccaaggcgggtggatcacaaggtcaggagatcgagaccatctgggctaacaaagtgaaaccccgtctctactaaaaaaaatacaaaaatttagtgaggcgtggtggtaggcacctgtagtcccagctactctggaggctgaggcaggagaatgccctgaacccaggaggcagagcttgcagtgagcggagatcttgccactgcactccagcctgggtgacagagtgagacttcgtctcaaaaaaaaaaaaaaaaaaaaaaaagtgaatcctttctatccttaaatttgctaaatatgtgacttattaggtacccatttacctaagcaaggcctctcaggccccttcaaagttggagcctctccctgatgtgacttaaaaaaaaaaacattctatttattcaatcaatatttattaagctacgtggcaggtactgagaatatggcagcaatcaacacattgaatgaggtccctgcctacatggagcttacaggctacgtggactgtaggagtcatgaagggaagcccggatgcccattagagagtgtctgcagtaggggtccgggtgagagatgatggtggcttgggcaaaggtggtggcagtaaagacagagagaagtagacagattcaaaatatgttttggaggtagagctgactagactcatgatgggctgcatgtggggtatgagggaaaggcaagactcaaggatggcttataggtcattgcttaacctccaggtcgatggcagtaagcaaataatacacaatcaatttcttccaatactgacagatgacagaaggagaaagtcggggtcttcagcagctgggcctgagccagtctgagggctcaagtctgccacagcagagggtccaggaattggtcacagggacagaaagagggcagaggatgctctcttatctccgctctggagccatgttctatttccactcagtcaggagagcacaaaagatatgtttttggggagactgtggaaatgtgaccccatacacatttatctgaactattactcaaaggaaaaccaaaactactcaatgaggaaacttaccaagtttataacatttactgagttacaaaaacttgtgttacaggatattgttcttgattttcttaggcaaatatgagcatcttaccaacagaatctctttggttccttttagcatgaaaaatccctttagaaaactgggaggctgaggcgggtggatcacctgaggtcaagagttcaagaccagcctggctaacatggtgaaaccctgtctctactaaaaaaacacaaaaactagccgggtgtggtggcatccgcctgtaatcccagctactcctgctgaggcaggagaatcgcttgaatccgggaggcggaggttgcagtgagagaagatggcgccactgcactccagcctgggtgacaagagcgagagagcgaaaaaagaaagcctcagaaaaaaaaaagaaaaagaaaagaaaagaaaagaaaagaaatctgtctgagggctcatcctgtgaagtctcacagcacttagaagtgacgtggcagagagtgggtgggctcccaaggtcagagtttgaggtccgctgtgagccgaccccctgaagtaaggaagttaatggagttgtgcctcctttcagatttgggtattcggattcccgttggacatgtggactacttcgtcaacggaggccaagaccaacctggctgccccaccttcttttacgcaggtcagaaagccagtacaatctggtatttggcaaccccggagattgaaattcaccaacagcttttgtgttgagtcagccagagtgggccatagagggtctacttgacagtgtcctttgctatgtcccataacgctttactcagaatgtattcaaggatggatgtcttcagagcccaggcatttgaggggagggtgtggcacagtccacaccaactgcatcctctacagagccttgctgtggcagaggcaagccattgtgcccaaagctggtgagcagaaggatcaattcactgcccagccatttcaccatatttaccaactcaaacagtcctctaaaattgttttcaagatgatctttttgaacacattcaatgactgtacatttcctctctttaaatacagccttctggaatttttaaaaatatatttattgatatattcttagcagactaaatttgtcaaaatctaaggtcaataattatttggttttcttatatcttatgaatatagccaatatatcagaatttcatataaaaatttaaaatgctgatttctgtttactatgtttttagtcttttcttgctttaccaaatttctaacattttaaggattcctttgacaatcttattgaataactactgatctattttaccaaatttactagttttccaaaaacatgcttcttttcgcaatttgcgaatttctcagcaattctgataaaataggatagtttggtttcaatggcttttgaagatttggtggcatttcaattgaccacttttcattttttcttcataacacaacttgagaagggtttagtttgtctctgccccagctccctgttgcaactggagagagcttggccatacagagtgtcccaaccacaggggaaaggaaagtcaaaatattgcttggccttggttgcaggtctcagcaacgaggtctcaaggtgcagggagagtttaaagaccccaggaccctggagttgtatacagctcaccacatacttcttagttccagccaatttatccaatgttgaatgctgcaaacttaaatagtaaataacagtgaaataagttttggtaaactgggatatttgacaaattcggcatatcagtcatttggcccggtgagcctcagcacattgggtgtagagagtgaccacaaacggcggctgatgcagcagtctcactgctgggtagggtataatgaggttgtaaaaaattggttgtatggctgatgataatggaggtaaaaatatgcacaaatacccattttgagaaatggggcagcatcatcaactctctatatattcccattttatgaaggagagtttgcatgatcatataatccatctcaaggccaggtacggtggctcacacctgtaatctcagcactctcggaggttgaggcaggtggatcacctgaggtcaggagtttgagaccagcctggccaatatggcaaaaccctgtttctatgaaaaatacaaaaatttgtgaggcatggtggtgtgcgcctgtaatcccagctactcaggagactgaggcaggaaaattgcttaaacccaggaggcagaggttgcagtggcccaagatcatgccattacactccagcctgggtgacagagtgagattccgtctcaaaaaaaaaagaaaagaaaagaaaagaaaaaaaagaatgcatctcaaatcaagcaattttcttgatggattatgcttatgtatctcaggaaaagtaaaatgaaaaaagtagaatgtagtaaccatgtacactaatattctgaaaaagtgatttgaggggactcccatgcatgtatttacagcttgctggaatataaaattcaatagagtttcactaaacagcatagatttccatttgtcttgactgaaaccttggttgtgttttttctctgttcaggttatagttatctgatctgtgatcacatgagggctgtgcacctctacatcagcgccctggagaattcctgtccactgatggcctttccctgtgccagctacaaggccttccttgctggacgctgtctggattgctttaacccttttctgctttcctgcccaaggataggtaaagtgctacccctttgacttcctttgacaatgtggggaagttcaagccctgctagttgtcccctcttaatgtcctgatgtcctatggtcaagaattctatccaatttgggaaaagaaaattaagcaatgaggtgctcagcctgttcttacttggaggtggacggttggttctcgtgccccacccctcactctctatagtgttccctatggccatccttgccccacacacacccttcccacatacaggttcctccactctcagaccagatgctgcctataggtctttctcacttctggccattctccagttcttcatagaccctaaatctatgacccttcatagaccctaaatctatggtggggaatccctaagagtggaacacaagacctacattacaggtcggatattctggtggcctcgtgagagctggggggatgcctagttgctggaggacttgggcaccttcctggatgatccaggccagtctggggaaaggatgccaggaaggctgcaggatctggcctctaactcacttgtgtagatcattgctatgcatatcccgtggttatccaggatgaagagctccaggaaaaactcctgggcagtggaaatggtttctctccctcccgcactctctcacttcccgctacccctggctgccactcaactgcagcagcctgtcactgcttatatgagtgaaatgggtaccagcttgacaaaatagtaaagtagggtagcttccaatgatagaaccagtcatcattatttcctattcattgtgcatatgtcagtttcccctagatgccatggacccacagacataacagccacctcacactgtctgcccagcctcatctctcactacactttctcttgcactgaacacctggtggtgctaactacttgtacttccaagtgtacatcgggcttcctcacctgtgtgccttggtcctaaccatactctcttcccagaatgccctctctccacctgtcatccactagtcttcaggtcaaacacttcctgcttcaccatgctcccactgcacgggatataaatgtcatgaaaacaactactataggagattggttttgcaagttagagacagattagtgtcagatttcttataataacctgccaagaatgagtcagatgatctgaaaagcatatttccgtttatgtgtgtgtttactgcccactggaccgagttgctgggatcccaggactcaccttagaatacagcacatagtgcgtgtatggtgtagatgtccgtggaataaatgggtgcatgaattaataaacacgtggctgggtgctgtgggaccctaagatagccttctcaggactctgctgtctttgcttctttatttccaggactggtggaacaaggtggtgtcaagatagagccgctccccaaggaagtgaaagtctacctcctgactacttccagtgctccgtactgcagtgagtagggggaaatgcatgagctcagctctgccagggcaccaccagaggagtccagcccagtgtggtagcctgggtgggagtgaatgataagagcaaaggcatcaccggaggtgtggcaacagcccctggtctgaaccaaaactttcagagtgagtccaaccgattgctcttcagatgaggacttgggggcttcttactgtctatctactgatcgtatttcctcttaccctcaaaatttaccctctagtgggtcttctctctcgagtgatgtttaggagtgtcctccggctgcctcctttctgcactctcatttcccacttcttggcgcccaccctatgtggttctcaccctggcagcctccaaggttggggtccctggggaatactgaacctttccctctggtctccttccccttcacagatgcattccagcttctcactgttgctcctaaccatggcatttccttgaagctaggatgctggtgattgtaacgatgttaaatgtgaagtaaaaatgtgtccagaatccatgaaatacattacaagctaaaccgtcatccttccctatgctatgtgcatcttaactagggtgactatacttcctggtttatgctggttatcctggggtcctgtttgctttatcatgtgtacaggataaagtatgccggcttggatgataaacaacatgccacccaattttaactgattttctgatcagcttgtgtcaagtcagtgcagggatctttgtgaaaatatcttcctggtaccagaaggcctggtgccatatgacatggagcctagagctcagactctgtgttcacctggacctggattcaaatctcagcttctccacttaccagctgtgtgatcaggaacaagttatttaaactctctgaactctatatccttatgtgaaaatgggaaccataacagtacctactttaaagaaccaattgtgagtataaaataaaatggtgcacaggagatcactagcacagggactggaacccaatcagtaataatttccttcccttagtcaatcagagaatttgggagaagaatagttagggtgtttgtatcttcatgccagagaaaatttttggctacctcttaggagcaaagtggactacagagtcaactgtgggcttttcatgtccttatcagctctttcaacaacccaactgggagacttaaggaaagggaagctctgagagaccaagtggcatgcccaagtctccacagctggatgaaaaggtcagaactcaactccaggtctcctgactgtaaactctatactccttcctcaccaccaccatgcttccatcttctgagaacctgctgtccgcaggccgtacgtctcagctccccttctgtcagcgccaccccatctgagttggcatgcgggaggatgttttgtctggtggtggaggtggtgttgccaggaccagatgtcctgacttctaattccagctgctgggcagattcacagcaacctgagctggtgcctctgtgtctgtgcagctaagaatatacccagcaggaaagtgtggggaatgcctggagactaacagcatgttaaggtccctgctgagggggttcacagggccatgttttttctgactcttttgtatttattgtgagaccacctccccacaccttcagaagcgtagccctgttggttccaaaaccacagaggggcacataaacaggcatgctctgccttgagctgtcacttctagggatggaagcggagtcctccctgctctccctggacagatatgggtagggagggggtagggaccagcagctctccagccactctcaggccatcatggcactgggctcccatgcctagcactcttggtctgctttgacttcagcaatgttgacctgtgccaggcatgcgccagcatgggcagaggatcttctaccaaataataatttttaaacaatatattccctcatagaacagtttttcacatagtgtaccttttctccattacttcactccatccttaccatgtcctgtgtgataagttgagggctatggcttgcagatgagggaactgaggcatggagaggctcagtgtcttaggcaaggcagcatggcttgtaagcagcagggttgggccttggatccaggcctcctgaccaaccactcaggactctgtgttgtacgacatgagacatgttcctgtgcagatttgattccactaattcccacccacccaacattaggcctagctcccttggggcctccagggtaagtgaagaaagaagtaggccaggtgcagtggctcacgtctctaatcccagcacttcgggaggctgaggtgggagggttgcttgaggagaggagttcgagactgcagtgagctgattgtgccagtgcattccagcctgggcaagagagcaagaacctgtttctgaagaaagaagaagaagaagaagaaggagaaggagaaggagaagaagaggaagaggaggaggaggaggaagaagaagaagaagaagaagaagaagaagaagaagaagaagaagaagaagaagaagaaggagacagaatcttagaaaactttcttaatcaatgatacttgctagcaaaggaagaagtattaataatataatatagcaaactcagccctgagaattaaattcctaaagcttctgtaagttagctattttttccacattgcaaatatcatcctttccagttcagcccttgcccgtccccataacaattgatatcccatagtaacatctgagaaggagagacagacagggtgtggtataagatgtcctcctctgtggaggggaagcattcaaggcccctttcttcttgtgggttcttggcatcttggcaccttttggtgagccctgttcctaaccccagggagctcagatgggccatagcactccttcaacttagtgctgagttcacctgcatccagtttatgttcccttccccaatgttagcccataaaatgtggcaaatgagaaagtacaggtagagtagaggcgaaggattgcatctctagctatgttcccatcaccaaaggagcctgggaaaattccgagactaaagtgattgcaaaatgccaccaggttgcacctaccccttagtaaaaaaaaaaaggacagtgtgttagggaaactgtaatctttcttttcttatttatttatttatttagagacagagtctcgctctgtcacctaggctggagtgcagtggcacgatcttgactcactgcaacctccgcctcttgggttcaagcaattcttctgcctcagcctcccgagtagctgggactacaggcatccaccaccacaccctgctaatttttttgtatttttagtagagacggtgtttcaccatgttggccaggctggtctcgaactcctgacctcagatgatctgcctgccttagcctcccaaagtgctgggattacaggcatgagccactgcgcctggcttttcttaaaatttttaattttgattttttttgagacagggtctcccactgtcacccaggctggagtgtggtggcacagtcacggttcactgcagctacaacctcccatgctcaggtgatcctcccacctcagcctcccaaatagctgggactacaggtacacaccacatgcccaactaattttttgtttttgtttttttgtagagactgggtcttgccatgtggcccaggctggtcttgaactcctgggctcaagtgatctgcccaccttggcctcccaaagtactaggatttcaggcatgagccactatgcctggcctgtaatctttcttaccttctcttgccagagggacagcaggtcccaggggtatcaccatggcccaggctgtacacccagtctatgttggcgacactcactttgagagctccagtgtccatgctgctcaagggagagtctggatgccacataggtaaccagcggctgcagggagaggagcagtctcctacacacacagcctgcttccctgacgctgggtgtgtggagagggagcagggccgttgctgtatttaatgagttaattctctctttcttttttttttttttttttttttttgagacagagtttcactcttgtcacccaggctgtaatgcaacggcaccatctcggctcactgcaacctctgcctcccgggttcaaatgcttctcctgcctcagcctccttagtagctggggttacaggtgcctgccaccatgcctggctaatttttatatttttagtagagacagggtttcaccatattggctaggctggtctcaaactcctgacctcaggtgatccacccgccttggcctcccaaagtgctgcgattacaggagtgagccaccacgcctgaccttatgagttaaacctttagtttatgtcttagtctacttgtgctactatgacacagtacctgagactgggtaacttacaaagctcagaaatttattttcccacagctctagaggctgggaagtcccagatcaaggcgccggcactccatgtctataagggttgcactttctgctcccaagaaggtgctttgctgttgcattctccagaggggacagataccgtgttcacacacagcagaacgcaggaggtcaaataagggccctgccaattcccttgagcccttctataaggcactatttcattcatgatagtagagccttcatgacttaatcccttccctcaaaggccccacctctcagtactgttgcacagagcattcagtttaaacatgaactcggaggggacacaaacaaaagatagccgtatatgatagatgcattttggctcattcaagatcatcccaccatgaatatgtcagcaaacaaggggaagtaaaacattagtattacaaaataacaaaaactaacattactgaatgcttcctaggcacaggcactgtcctgagaagttcatacatattaacccacttatttcagacctagggtatctatttttttttttttttagacggagtcttgctctgccgcccaggctggagtgcagtggtgcaatttctgctcactgcaaactctgcctcctgagttcaagcgattctcctgtctcagcctcctgagtagctgggattacaggcacccgccaccacacctggctaatttttatatttttagtagagatggggtttcaccatgttggtcagactggtctcaaactcctgacctcaggtgatccactcgcctcggcctcccaaagtgctgggattacaggcgtgaaccactgcgcccagccaagtgtctatttttattatcctcaatttgcacttgaggaaactgaggacctgagattataggtgatctgctcctgggcacacagccactaagagatagagccaagattcccaaccacactgctgctctctggggtttttgcccattgcaccttctgccctctggccagtctctgttgtgctttggtttcctagtgcatcacagcctcgtggagtttcacttgaaggaactgagaaacaaggacaccaacatcgaggttaccttccttagcagtaacatcacctcttcatctaagatcaccatgtacgtaagtgtcccacctggttgactcctccccttaggagttggttactttttcattttacacacatggacatcccaggtcagggactgtgtgattgctgatgcatgggcccagccggcttggctgggggcagcacctactatagatccagccacagacacatgctgaggagctgttcagtagtgggtccaagtatagcagattcagatgagagtaggcagggcaagcaggcagcagggatggcatgtcccaacagatggagaggacataggaatcaggtccctgagaggaaacagtactctggaatccagacagtgcgggtatcagggatgtcagtagggaggagggcctcagtcaccagcccaggaagggctagccagagcctggagagcacccactcctgggaaaggagagcagttctgggtcagttaccagaatggaatctgaggcacagggtcagtcagcaacggagtgcgagctgagggccagactagcggccaggagggcttggtgctgggtgattcctgaaactgggggtagtcattcccttcctttgttggggcagacttgggcttgggggctggtgggactacgcttgaagtgagagggcaaggaaccccaactgtagggagccacagcctgcaggggataggaagtcagcagccatggtgcatgcttctttaaaaagcaaccggttagttattcacaagccagcgggagacagattgtcagataatgtcactgtctcagtgagagtccggtcaggaaaacagaggaggtccaagagaaggaatttagcacagtgaactcattacaagtgtgttggatgagctggaaaacagagatggggacacaatgcagagattaatcacaacaggagccaatacaaccctaggctagagggacaaagcaggagtggagttggcaaagctgggtccacagggaaggctgcttggcaggagctgaacccatgggaagtgcggcccctctggaacccctgcccaaagcagccacccacctgagcatgcttccactgggttagacctcactggaacctgttggtgggggaacctgcaggggaatagatcagtccagagcaaacagggaaatgaccagtgcacacacacttaaatgagtgagcaatgccctgagagtgacagcatagaagacagagtctgactgagtccaaggaaatgatgagcaggctttccaggagctacccaggccaggcttagagagaatgtgacacctctggtgtgtctggagcacagatttggggttgtggggatgctgtgaggctggagaggcaagtcagagccagaccctgccaggccttgaaggacaggtttttatcctgagagtagtttggagagccactgggagttttaaacaggacagtgatgagatcagatgtgagtttggagatatttctcgggttgggatgttggacatgaactctgctgtgaggcactacaagtttctgctggaaggagtgcatttcactcccaaaaccgtggccactagctggtgttccttctggctcacccaaagtcacacagctaggtacagccatcaggattccagcacaggcctgcaggtgcccacagagccttgcagattgtggctggatatcagtaagccaagtacctttcattagacccgctcaaggttgtgctacttctagaagggtgttttcatcatcttctagcccattggtaggtccagcaacactggcaggagtcatgaaaatgacccacaaccctgactgcacgttagaatcacctggagagctttaaaaaatactgacgccaagccccccaacccagaccaatcacatcagggtctctgggcataggctccacagctacattttaaaagctccccgagtaattccagtcaacatccacagattagcgcttcctcctccatgaagaggttcacataactcttttgaagaaggcaccagaacatgattcacttcttgcagatcagaaattgggggaaaaacggggaggttatgtgtggtctttttccaaatttctatagctttatgcgacgctaagatttccttctaattggagaattaacctgggccaactccccaaaccactcacttaaaagatttttcatattccttgtattttacaaactcttcagtctaagcttaaaggaaacaatcttatttattccctctgtaatatttcaaaagacttgtgaatttaaaaaaagagggaatggtttttaaacaaaattatacatgatcttccctcagaaggaaaaaacaagtgatatgactaacactggactaaaaagaacacaaagaggccctatcaccactctgcgaaggccagaaaggaacaggaaacccagttggcaagggtggttccccacaccacccctgcccccgccgagaggaacgcagcgccctccttctttcctctttttcagagtcccacttggattccagggaggatcacaaagggccccacaagtcaaattccttccctagctgggtggtgcagctctgctgggcgccctccttgatcccccactcaccaccctcaggatctgctggctgggctgtgccttgcactcagcgtgaagactttcctcattgaatctcacgattttttgcttttgtctccagtacctagtacctagggggtaccacagcccttttggaagcaccctgctaggttgatcacttcatactcctccctcatctttgtctcagtccaaagtggtgcctgaatctttaaacataaagggaatctgggggggcaaagccaagaggctgggttaagacagaactggatgccattttcactctgagtctcctcagctgaagtcagtatgaaccaaaccctacggttcaagttcatagcagcatgtagggaagctggaacttacacctagttgctatgtgactccacagccaccttgccagcttaggtaacttgtccaaagccatacagctgggaagacaaacctgggttccacccaactctgtctgcgcttcatgatgttttcttgttgctgtttccacccacacattcatacttagcctaaaacagaaaagtccttacacagaattctttgaaaaggaatgtcctaaaagagggtttctacttctgggtaattagatctgaaggtgaagatctcctccagctaggaatccaagaacgaggaacagtttttccagatatgaaaatccaggagctactattttgttgcagtgtccacttgtttattctaaaaaatcaacaactactttcttggtcatattcaaagctgtaggtgtgggcagaggggctggtgaaggtgacacaaaggactgtggtaaggagctaaccccttggtgcatgacagccaaccagtgccaccagcagagcccgatcggagccaaaggggaagtacaggtggtaagggctacagtcatttactttccctttacccttttcttgcagacctaagcagcaacgctatgggaaaggaatcatagcccatgccaccccacaatgccagataaaccaagtgaaattcaagtttcagtcttccaaccgagtttggaaaaaagaccggactaccattattgggaagttctgcactgcccttttgcctgtcaatgacaggtaagccccagtattcacctctgcaccagatgcactcacacatcaaagaccagtcttggcattagatgtgctgcctattgaggttcaatctcatcatagtgattatcatcttagaagcagagatgacagacacccggtgttttccagaacctcctgtgggaccatcttgggttggggaaattccactgtatttgttctgcatatttggtttctatgtaagattttattagaacaaagttttctcattgcatattttctcctctgtggcctccactccaactgtgtcatgggtcacattcatgggtgtggatccagaatccacatcccctttcccttcctctaaaggcatttatgtcattaaccttaccacccctgggcacttggaccacaggaactggctcttaattgtaggtgattgcagatttctttcaccagacatcatgggaattcaaaagccacacaatgccaagccctgtctcctcaccagccactgctctcttattgctcttctcttccagagaaaagatggtctgcttacctgaaccagtgaacttacaagcaagtgtgactgtttcctgtgacctgaagatagcctgtgtgtagtttaacctgggcaggacacatctccctgcattttttttttttttttgagagagaggtgtgatgagggatgtgtgtgtgcagcttattgtagaccattactactaaggagaaaagcaaagctctttcttattttcctcataatcagctaccctggaggggagggagaactcattttacagaacttggtttcctttgccgatcttatgtacatacccattttagctttcccatgcatacttaactgcacttgctttatctccttgggcattcgtacttaggattcaatagaaacatgtacagggtaaacaattttttaaaaataaaacttcatggagtatctgaa

SEQ ID NO: 217 - DNA, 18637 bp, Homo sapiens
agctgagccatgtacttcaaacagaaggcagccaattactaacttctggttgctaggtgtggcttcctttaaaatcctataaaatcagaagcccaagtctccactgccagtgtgaaatcttcagagaagaatttctctttagttctttgcaagaaggtagagataaaggtaagtcttggttttccttttagttagttttggttgttttgaaaacttttctcatcactatgttaaatgttactgcttctacaggatttatggttagttgcatttaacatgataagtcattcataaatctttctgtagaattacattggatatttatattttaggaatcacaaattacaatatttttgttctacttagttaacaaatacaagtaaaaataagataagtttgcttaatactggctcattgtactcttggtaagttaccatgagaaagaagggaagaatgtgctttccctctggtagccttaaaagaatgtgtttttcctttccttccccttgaaatatttcttcccaagagctgtgtgttttacagagaaatcgtgatgggggctgctttttgggggcaagaacaaaagtgataggagtgggctgcagggaactgtttcaaaatagtaggactttcataatttattttcttcttttgtaaggaaaacaagatagattcagacctcaaagtgctaatcatgctctttgtaataaacatttaaaaatatatgttatatttgcttatgctatttaaaataagaaggtccgcttattacttttttcatttaaagagggtgtggccacattccttttcttgtaggctctgtgtcatatacagtcttttcaagtgctggctggaaaacctaaaaagaagggaaatactttctgggtagtgtcagatacattatcctaggggaatgtcagtgaggccctccaacagctattccacttgattgttgcatgagctaatggccataaaactccttagaaaagcacaaagcaaaactaaagaagagtatttactagtgttggatatatttgtaaaagtgagattacaaatcatgtatctggctatttttttcttaaacatgttccttcaagaatttttctgttcgttcattttaaatatttattaaatgttctgatttcttatgttcactgctagctaattaacaaggatggaatttttcttgccttggttatatctaaaagattgtaaaaactttgagaaagcaatgttgccctctttccacaggagtattttggtagctgtaagagaatgcacattgcaaatgactcaaatgtggtaaaatgttggtttcataattctgaaatggcctcttccccaaaagtgacagtaacaccctagctccaggctcaaccacatccagcacatagccaacatttaacagatgttgacaaaatagttaataataatattattaaggaaccagccagagtttcatgcttattaaatactttttcaaccagaaggtctgcaaaggttgatttctgaatatgacgttagctctctctagacctattaatttacgacatttcaaatcagaggtaaaccagcagacctattatttttcaatgataaactataaacagttttttgaagtcaactatttccttttcctttaaaattggacagaatttcatcaggaagctcagaacaatccaatttatataatgccttccttcattatgctaattttcttcatcttcatctacttgaagtaatatttaagattggcacttcagagctgtaaatggatcttagatgataattacttcaacattcttattttataaacgaagaccctctggagaagctaaatgtttttcttgaggtcagatcgccagataatcaagaaccagtatacttcaatttgtattttatatcctatagttgtgggtagaaaatgttcattaaattagtgtagatatgttttttaaaatattagcaatgatacatgatattcattcaataatacttattaacatcctaaattccaggcattttgctagggattggaagtacatacataatgaatattattatttgtatgttagcacgggcctcatggcctgctcctggggaatataaacaagccaatggaaagtgataatacagaaaggtggggctggtgtaggggtgaagtcaggatgctttgggagagcatggaaggtcaccgaatccagtgctgaggaactaatgaagggtttctgaagaacgtgatgagatcaatgctgatgagtcacttagaagtagcaattagttaggcaaagggaagtgaatgtggaggaggaacaagcattccaggcaagaagaacaccctatcgaaaagcctggaagcaaaacattagtgaggctacctttcataaattgctttctgtaagtcatgccattgtgtagtcttaattgctttctctcaccagggaaggtgtgggaaggacttgtgaaatacatattcgaggaaaaactatgcacaaggccgtgcatttaaaaataaactccctaaggctggggtgaaacctgctacggtctgcgcaagttgactgttaatgaatttgattctcaggtgtgagtgattaaaagaacactgatcatgtcattttctttttggtcactaattccctccctcccttctctttcttttcttttttcttttcttttctttttctttctttcttcccgacagagtcttgttatgtcgcccaggatggagtgtagtggtacaatctcggctcactgcagcctccgcctcttcctgggttcaagtgattctcctgcctcagccttctgagtagatgggactacaggtgcacaccaccatgcctggctgatttttgtacttttggtagagacggggtttcgccatgctggccaggctggtcttgaactcctggcctcaagtaatctgcccaccttggcctcctaaattgctgggattgcaggtgtgagccaccatgcacagccaaaatatataacactttggaatcaaaagggatggatttatgtctccattcttgccactactagcaggaagactgcttgaaaatagcactcagttttcccagatagaaactgaggataatgattaaaggctattattccaagcaagggttagtcattgctgttactatcattgcaaaactctgatagttctagattgtaaccaggaagatacaatcaaccacaaaactcagcttcctctgtcacaaattctagatagaggtagcctttcatgaggctgagagatggaaaaatgaagcggggggactctcttaggacacataaatatgcaaaaaaattgctacgctttagaaagctatacattcaaatcatagataagctgacattagtaggcagtgcatgttcacaaaaagaccattaattagaagaaatgtgaaatattgttaatttccttatagatttgcctatgtataaatggccaatttcaccgtcaatgagctcatgctaagtactgaaataaacttagttttagagcttatctttggttagttgaaatctgtattgagttagttgaaatctataagttgatagaacaggctctttaaaatctattgcaagctttatacactacaaacaaaaagatagaaaaaagaaaacctttcatgaactcattggcttaggcaggttttcatgcagagtgtaggtattgaagagtcagaacggcttaaggatagaatttggccaatatataaaaaaatatatatttggtatttgttagttgtattataattattcagaagttcagttaatacgtgcagttggctttgagcccttaaccagctgtatgtgataaaatctgtttcctttagagcaatttcttatatcctgccttgatgctcctgtctttaatctttgctaagagctggtggtgaatttggctgaattcagattccgtttttctctaattgatttcttgaagaaaattctctattggttgcttttctttcctagattatgcttttagtctatccaaatacttcaggctagaatgtaggaacttagaagatacaaatcacaaagctgtctcctctagggatgctctctctttcaaataagtgacttaaacaacttatttttgttatcttgtgttatgtaattaatataccttttcctgggctttctctggctttttttttaaatggacattattcaagtattttttagaagtaaaaaaaaaacagtacagtaaagtttttataacgtttattttgaagttgtcagagacacctttaatattagactggacaatatctttagtctttcttttgctttcttttgaagtttttatttgctaattgaaaagaatggaataataataataataataataaataaataataataataaataatataaataaataaataaataaataaaataaataaataataaaaacatgtttttataagtgatggagtagtactttgccaagtgatgaattttaacactcattttgatgattcttccttatcaaagccttggatgaaatgatgaaaatggaaattttgagtgcctgaagctgctagaattgcttttaaagtattgggtgtgccaattaagaaggtggaatatgaaactccatgtggcaaccgcaattgcatgaaactagactgtaatgggaactaaaaccttgtgcaaaattgcgggttgttactttatcaggaagcaattttaagtctatcaattatatttaggaaacaggctgctttaaatgaatggaaaaagtattggttcttctcacagatgacagaatagtaataagagcaatcccatgcgaattaagtggggatgatttctgctttggatattattttcttcatgcattcagtgttattacttgcaactccagttactttttagcaggtgaaaatggaaagagtttgtctgaacatgctgttgaggaatcagtttatggaatcagtttatgcctcatgagtcatttatcttcatatcaagaatttaaaactgccaagattgtcctcccaacctctctcacaaacattcatgagagtagtctctagaggggtgaaacagaatggtgtagatagacagatcagtgtagaccttgagcaaggcctctgaaaaacatccccagactaaaaggatctgtgatggcattttgtgtgtgtgtggccaaaacagagaacacattaattttcaatatacttaagatcttaaaaatatatgtctcattaaataaaaatattgccaagtcatgatagcaattcaagaaatttcctttaagatagagtttgccaaaagaacatgcatgttacaattgcacctctaggcttcctgctacaacaaaaaaatccagtataaaataattcttttctgggttttttgtgttgggtgggaaaatatgtaggactactatttagacagctcaaataggaagaaatgtgaagatagcaattacttcaatgctgagtacttttatatcaagaaatagaaaaggaaactaaattattcagggagaaatatcacctggatatctttttacaattaaaattttaaatctgaattcacttgtacagattggcacaagttattttaccttataaatgtaatcattggctgggagtggtagctcacacctgtaattccagcactttgggaggccgaggcgggcagatcacttggggtcatgagttcaaaatcagcctagccaacatggtgaaaacctgtctctactaaaaatacaaaaattagccgggcgtggtggctggtgcctgtaatcccagctactcaggaggctgaggcaggagaattgcttgaacccaggagacggaggttgcagtgagtcgagatttcaccactgcactccagcctgggcgacagagaaagactccatctcaaaaaaaaaaaaaaaaaaaaaagcaatcattaagcttttcatctagccattacttttgtacaggctctcattaattccacatagatggtctaatggtctactaaatagtattctaatcctccatcttgtctatctcttagccattctccatgataaaggatgaatggtctttcggaaacataaatgaaaccatgctgctttaaaaaaacaaacaaacaaaaagaaacccattaatgttttcccaaagctttgtggacacattgaagcttcttgtttcagcttctgccaacatttctcgctccagcaaactttcttctgcttcccaaatatgacaagcttcttctttaacttttctgccaggttaatcttgactcatttcaagagaggcttgggtcagccagggcctactctaagaagtttctttagcccttatgttttcctatggagagcacacactagctttaagtcctgagggtacttaagatgatatttcaatgtttttgtactcttagtgcttggcatatggtgggtggtctacaaatttagaacaatgtagtgaaccacaaactcctctcttcagcctgtgtgcttacttgtagtagttgtctgatctctaaaatttagaactgaatatgccaagaaagagttcaatttcagagaggagggtatggtttcattttaagtataaaagcttcctttaaaaaaaattacgtcttacattttgttatgctcctaagtgtaattgatcctggaaagtaagcgcaaggctactctctaatgctaactcttatgtatgtaagaggtgaggaaggagaggttgtgtgtggtgcatttgttttgtaaaagcatctaactgttttctttccagacactttttcaaaaatggcaatggtatcagaattcctcaagcaggcctggtttattgaaaatgaagagcaggaatatgttgtaagtagagtgataataaaattatgattacaatattgaaataaaaacgaatataagtaaatggccattaatttatttctctctcattcttagcaaactgtgaagtcatccaaaggtggtcccggatcagcggtgagcccctatcctaccttcaatccatcctcggatgtcgctgccttgcataaggccataatggttaaaggtaacgtgtttcctcaaaacagttccctcctggacatttcagaatggctatttgaatgactgtcaaaaaacagacatgtgcaatggaaagaatctgtttcattttgaagataaaaacatttctttgccaaacgaagatgtaattatttacttaacactgaggaaattgtgttcacatcagtggaatctctattgttacagcagatattactggctcatttctagcagaaattccatgctgaaattaaaagctctgttcacatatagagttgcaactagtatcaaacactgcaacactgagggccaggaaaagttaattgtctcttcctttctcactcgaatgaaatgtcattctcccaagtgcttccttgatatgtagtatagcatcgattttttaggctgatatataatttatatttcttaatttgttaagaagttcttttggagcatctcagtaatgaattattttatgtcaattgatgatgaagaaaattggtgttaaaggctgttggccctttatttccaggtgtggatgaagcaaccatcattgacattctaactaagcgaaacaatgcacagcgtcaacagatcaaagcagcatatctccaggaaacaggaaaggtaagttagagtggtaaatttagatatttaatttcagcatagttatacttaaccatggattcggaagcacagttacctagttctttaaggttctaaccactgttttctcattacatctatgattgggattgcagtgtttatccactttgttgcaatttaatcaattttatcaaatttcctatttttatacattagtcatcttggtgtatattgtttgcagatgtggtgctctggggacaaatttttaatttgaacgtaaacatcgagattgctgctgtcaataaagaatatggtctgattgaaatgtactaatatttaaactgaactgtttaatgcctaaattttatatataattctactttaaaaataagccttatgtcttttataccaaatatgagtagttttctaaagcaatgaaattagaaaactatataatttcagtatctgattatactgcttgttatttgagaagtacaaacctcaaagattggaaacatgaatatattattttaaaagtaattttacttctgttttctgttagcacacagtcctctgtgttttgatctttgtgatttctcccctgtgtataagattactaaccctatgctttaagaagttattgatgaattcagtaaattttattttaatccctctagatctggaagggtaagataatgtttcaaaatatttggtacactttgtatgtgaagggaagaagctctaaaagatggttgggtttagggatgagttgtacgatgacctaaagtcaggtaatatcacattttttaacctagcatgttacttattggaagtcctgattctaatctttttttttgtagcccctggatgaaacactgaagaaagcccttacaggtcaccttgaggaggttgttttagctctgctaaaaactccagcgcaatttgatgctgatgaacttcgtgctgccatgaaggtaaatcgcccaatttgagcaaactcctttcctcaagaggatgtattgggcaagtcacttatgcttatgttattttcaaaatctagtatagtacctgtcaatcagtgggagtttgaagaataaataaattaatacctcaatgaaggaattaatatataaatgaaaacagaaatgttggcactaacaccttccatgtcatgtcactatatgagtcatatatttgcatttttatttttacccaaaatattgatgataaacttgttttgttttagggcaatgtaatagagcttattgtaattattaaatgttgtgggtgaaatttactaaatgacagagtcaaacaaattttggaacaccaaaaactcattgatcctcttgcatgaagatttttttctacatttatccttttcttctcttcaaatttagggccttggaactgatgaagatactctaattgagattttggcatcaagaactaacaaagaaatcagagacattaacagggtctacagagagggtaagttgtaatgtccaacagtccaaacgccttatttgaaaaggaaatctaatatactttcttaaaattgactgtctatggtaattatggcagctttggaatctccacatatcaaaatgtttctttattgtttggcacatgtctattaaatgctgttaccaggcaacgcttgagttgctaggttgctgacaagggagatggtgtcccaatccgcatcaagcttgcgttttaatagaaaatgttcctctaggataaatggccacatacgattataatggaaacctcaattcagagcattgaatttttaaaaatttctgaaaaacacttttctattattctggaatgtattttataaaaatgtcccaaggtcattttttttgaaaagaatatataataacaaaaaaatctcctaacaaaatgtttttcatttgtccttgaaaaagtaaagaattaggtgcttataattctctgttggaaaccttaactttatcgttatgaacataagagactcactttatctctagttaaattcacagaataaaagactagtcttagcttattttatctctccagtgaagcatctcatttaaatgatgtgctcaacactgaaaagagggtaattgcaagtctcttaccattttcctactctcatttccctgagctgctggctttttggctttcccaatgcaatatatggcatatagaagatctttctgcttgattctcataccaagcatggagaatacaatagcttttgcatatcattttcagaggaatttaataaaagaataaaaataaggaagcttttaaacctcattttctgcaattcttatttaattaccaatgtttatgttagatccatgtgtcagtggtaataatgatgattatttttgtttgataaaacatagtttataaaaataagtgtttatatatttttcatatggccaagatataggccagtgatagtttattacattgcccagtttcaagttgttttagtccgtttgtgttgctataaagaaatatctgagaccaagtaatgtaaaaagaaaggaaatactgtacaagtagtatgggaccagcgtctgcttttgatgagggcctcatactacttctactcatggcagaaagcagacagaagcagatgtgtgcagagagggagagagagaaaaggaggtgccaggctcttttcaacagccagttcttaaagaaactatgaatgagaactcactccgagccattcatgagggatctgcccccatcatccaaacatctcccaacaggccccaccttcaacagtggagaataaattgcaacatgagacttggcagggccaaacaaacaatatgaaaaccatagcactagtcaattataaattcaattattttttcctattacagtattattttatgtagttaagcagaagtgtttacacacacataaatcatcaaactgcattacttataagacatttatagtttttaaactaaataaataatttgcattcaagcaagtacctcattttgttcttttaaacaattattttattcattctattgcttaaattctgccatgttgtatttcagaattaattactaatgtatacctatacaatttattcttaacgaaagctttatgactgtgagttttcaatcacagtattatctaaattgctcccattgcttcatatgaaataaattcaatgatccaaaaatttacctgctttaatttttctcttcttatttaaaaatgataatattttgcaacatgttccataagtcattgaacactgtggcactgtgaattttcaaccaacttagagatgtcagatattcttattattattcatcactggtttactataaaatctatttttcttttttctcagaactgaagagagatctggccaaagacataacctcagacacatctggagattttcggaacgctttgctttctcttgctaaggtacaactcagatactttaggaaatgcctcttgttttataaagactaatttcttagtccattttgtgttgctataagggaatatctgaggctaggtaatttttaaagataaaaaggtttatttggctcaggattctgatggctaacaaattcaagtttgggtatctatgtctggtgagagcctcaggctgcttccactcctgacagaagaggaaagggagctggtgtgtgcagagaccacatggcaagaaaggaagcaagagagagaatggggaggtgccagcctcgttaacaaccagctctcgtggttctcatgagcaagaactcattcccagtgacggcattaatctcttcatgagagatcagccccaggacccaaatacctccctctaggccccacctttaacactggggatcaaatttcaacatgaggtttggaggggaagaacatctaaaaccatcgcaagtaaaatcttgtatctgagctccttctagaaatgagtaatagaatacctttttctcaaaaaatattatttatctgagtttaagataattaagtaaatcatgcaattacatgctagagaagagcttacaatagaatgggatttctttcagggtgaccgatctgaggactttggtgtgaatgaagacttggctgattcagatgccagggtaaggaagtgcttacaaaatactgctgcagttcatcttcctaccttaagtggggctaccacatgatcccctgtgaaagcaaatctaagatcttctgagagaccaatggcttcttaatgttcatttcctgaatgaggcatgtctttctgtagcccccacacacaaaaaagtagtctttgtaagttttcaatatctctcattattcgtaaaaccagagagaactgaagaaggacaatacaaatttgatttgtcattcccaagaattgtttgttaaaaaaaactctgacctttcgttgtactaggtataagaaggggaaatgtaatttttttattatgtgcaatggaaagagtaagcatatttaacgttatttttaacagagaactttggaatggtttatagatgtcaatttatattgtcaaaatattactgcaatgatataacaagagtataggataaattataataatatatgctttctaacatattgttttatttagtttcagtgacattgctgattatttatatgccaaaccactggcaacataagaaaaatcatatcattttaaagcctggaatttccatttaaaacaaacaaacaactaatatttgcattatgccttctcatggaacagtattctctagagaattcattacagtgcttcactaaggatagagatttctttgtgcacccccatccacttctgctataccagtacattatcatgtacataataggcactcatgaactttttgttcaacaaatgcatacatatcagatcaatttgcttgaaaaatgcaaaataatttttacatacattgaaggttttatcattttaatagaaattgttcaagcatattaaggaacaagagttagcatttgaataattgcccataataaaaaattcttatttgcttttgacatttctgaatttgctttccattttaagactatcagggttcttaatatatatttatggaggttacatggattagtgtgacccaagagaatgatggtagtcaacatttcaaagttaataaagaccgcttgtgacaatagggcagggattatatttttcatatataaaagaaaaaaatctgtcatttagtaaggttgatctatttgtctaagattatgcagctttgaaattgcagagtcagaatttgaatacagaaattctaacatcaaaatgcaaggtccaggttacggttgaattattgatttataagtaacatttgctgataattactttgaacaacacagagtaaaaaatctttagagatccccttggagttgtcttactatagagcataatcttaaagcaatttagttcagcaaacatttattctgcaaacatatattcagactctagtgtttacaaggcaccttgagagaaactgtggaagatatttgacaaacaaaataaggtccctatctttaaagaacttgcaatcttattgttgactactctgattgtattgggcacaaagcgattgcctatataatctttgacaaggtctaacattattgtgcagatatcatttcagcagatagtgaagtgtttacttttgtgtttcttgacaggccttgtatgaagcaggagaaaggagaaaggggacagacgtaaacgtgttcaataccatccttaccaccagaagctatccacaacttcgcagaggtaacaataaatttctttttctggaatctgtttatggaagatgcaattttcttttttgatgacaaataagagaaagtaaaaacagaaccctttttcaatatcactcctgtatcaaacagatacagtgttcctgacccattgttatttgtcaatttgtccaattttgtacagccgctactttatcatatttaatacattttgtgacttgggcatgtggaacataattttgttattttcactgcttttactcccctaaaagatttggaatatgtgtgggaaaagacatgcataacagaacaaatgaaattagaatgaagaaaaacaaaaaaaaaaaaacaaaaaaccctcagagctaaatgaagaaagaaatatgtaggtgctttggaaaaacaacaacaagacaaaactcagaaaaagtcctggcctttgagtgcaagatttagctctgggcctcttggaagtgaaggcgatggaaaagttatgacaattaccaaagttcaccatcttataatagtatactgatttctactgttaaatgtaagagaaatttagtgcacaggtctttatataagggaagatccatttgctgtggctcttagaactgctgtaggaagtgctatagttgtcaatcacatgccgtttctaataactgtcaacatttgcaaacatttcgccaaaatatataggaataccaaaatggccaggtaagttacattcctaggagaggatgaagtattcacgttatgattaattgggtatattgctttaaaaggtgtagccaaagttgttattctaaaaaattctttgagtcagttgccttgattttgctaaagctttctaaagaaaaggatgttttgcatgtatcttagtttgaatttaatattcagtgtttcagaaatacaccaagtacagtaagcatgacatgaacaaagttctggacctggagttgaaaggtgacattgagaaatgcctcacagctatcggtatgtagtccagcagttgaaagagttttctaactagaaattgtattttcaaagctatcctatacttaacaagaacaacagcaacaaaaccaataaaagaaaacaaaaaacaatcagaagtagtgcatctgtttcaattgaagcaacgtaaaagattggcaaagtactataaccttaataacaatagatattattccccttttcaaaaatagagagagatagactatacttattgagcacctacttatatcaaacaatgtaccaggctgggcacaccacagaggcaattcagaatggtcactgagagcatgggatctggaataaatgtaacatctggataaatgtaacttcaagtcctggtctactgcttgttaattgtacaatcttgggcaggtccaggagagtctgattcagtgggtccgagttggcctctaaaaatcggtactttttaaagatctcccaggttattcagacaaccatcagggttggggaacctatgttctcaagcagtgtttctcattcatgactatgcacttgaatcccctggaaagcttgttaaaatgcagattctgattccccaggtctggggtggagcttagattctgcttttctaacaagctccccattgatgccaatgctgttggtccatagatctcgacaagatgaagaacactatgaactggaatgtgctagtattatttgggttctgttttatatttaagcccatcctatcccagagttttttcttcatttattcatttatttttacttatttgtttgtgcaactcttactttagacacagaggtacatgtgcacgtttgttccatgggtgttctgcactcaggcagtgagcatagtacccaataagtagttttttgaccaatgccccttctctccctgccctctctagtagtctgcagtgtctgttgttcatagggtgttctttttaaatgttcttatagtaacataaataaagtatttacataggcttgaacacctagtggcttctccactcccaaggagaatatatgttggatagcgcaaactactgaagttgctcttgagatgtatttaaggtaataaaaaaattgatcgtcagggaaaagaatattcaaaaccaccatctagagagtcacaaataccttctcagaagttaactgccctatattgggagatgagaggtgaagaatgatgatgagggatagaacactgttggcaaaattctatatttcctgtttctttcatatggatatttcatttttttcatggtaaatacatcaactaaaattttcttctctaacagtgaagtgcgccacaagcaaaccagctttctttgcagagaagcttcatcaagccatgaaagtatgtaccattctacttatatgtcctgcttagaggaagaattatttgtagaaagaacagaaaacctcatgttgtttgaaaatctcacatttaatatcttcccattaatgagaatcattgttctatttgatgaaagaggtaatacactaccttctcagaataaacttctgttagattcggtgcttttttttacagatgagattgtaaagtgagcctgtaagtgatttacggctcacttgtgatttgcttaaaacatgtgtcaccacgggaagggtgatgtactttcttttttaacgtgtaattttagtggcctacttcctctaaggttgtgagttttataatctcccactttatgagtctgatttgttgtttttattattctgtcttttatgccacagattaatagttgaaacttttgaaatgtcattctatgattaaggatgtagaatgatgtatttgagatcaactatgtcactttaactttactgtctgacatgcatggtattatacaaggtacctcttctattctgacattttgagcccacaaatgaatagttatgaagttatcttccttttttctttgcagctccaaaataaggaggttttcagagagagagagaaagaaagatctaactatttgaataatatgaaggaatattttgaatatatatgaataatttgaataatatgaaatgatagacatgctaggtactgctctgtagtggttagcatagttgctgccccctttctgccatagtctagtgtgatatttcgttgggtaatgatgaatacctggtgccatggaagagaaaagtgggacatatactccagactttggaaatccaggtagcattgctgtcagctaaattaacacctgaagtttaaatagaaatgagccagatgagggcaagagtggaagagatggggataaagcaagggtggtccaagaggaagaagtaacccacacacaggcttgaaggcaaaaggtaacataaccttctcaagacagtaagtatagagtgatggtgcacactggaagagatggtagaattaggcaggatattgtaagccttgaaaaagaattaggcaggatatcggaagccctgattagattctatcctaagagcaacagaagatcactgacagtgttttaaatagatagactagtttattagatttgcagtttagaagttccctttttttgtaattattggacagtgtagagaccggatggtgagagatgagttaggaagttgtgacagctctctatacctaccgctaatgtagaggattatttattttcatttcattaccattcgtgtaaggtgtgtgtgtgtgtgtgtgtgtgtgtgtgtgtatagctagtttctctatagaaattatatggaagagtaagaaggcttcactttaaaattcatgtttttaatgagagtattttctgaatatgagacacttaccctcatttattttggccagggtgttggaactcgccataaggcattgatcaggattatggtttcccgttctgaaattgacatgaatgatatcaaagcattctatcagaagatgtatggtatctccctttgccaagccatcctggtatgttttgattcctctaatgccatcccaacaaatgaaagttctttttgcaagatcttcaaggagaagagttgacttattgtatctataaatttaatatgtaagattaatttaatatattatggtgtatacttcatgagtaaattgaactttcactggtaaaatctactagtgagttctctactgaaatactgggtacatttttcaactaaagtcatggaaacatttagtttcccatgcataaattcagcaagcagaatattctagtgttccccctagggtagatagacattgtggtttattttgccattaatatttgtcagaggattagaaactccttattcaaaatatttatcttaattctatcacatgtaaaatgtttaaaatttatgttcaaattgtctcataagaatgttaaaaaataagacaaagaacagtcaagggttttggacttactgaaaggtagataacgattcaaatttaattaattagtcatattggataactaaaatctacccagaaaatgtgagaaaattacaggcactatacatttctcttcttctggtgagtgaatcaggtatctcctcacataagatatgagattatattgtgttatacttatttaattttgtgtgatatttcattcatagaaaataatggcactaatataaaacataattaattcagaaaagtttgtaatctcagtcttgaaggctattgcttttttatgcaatgataaaaaatcagttatctgttgtatatattgtttaattaagtgaatggtaatgtgtaatctcatctacagctaagtctaaaaataattcttctataagtaaaaaaaaatagagaattatggtttcgactaacattaagtatacctttttttgaatcaacaggatgaaaccaaaggagattatgagaaaatcctggtggctctttgtggaggaaactaaacattcccttgatggtctcaagctatgatcagaagactttaattatatattttcatcctataagcttaaataggaaagtttcttcaacaggattacagtgtagctacctacatgctgaaaaatatagcctttaaatcatttttatattataactctgtataatagagataagtccattttttaaaaatgttttccccaaaccataaaaccctatacaagttgttctagtaacaatacatgagaaagatgtctatgtagctgaaaataaaatgacgtcacaagacaa

SEQ ID NO: 218 - DNA, 12893 bp, Homo sapiens
cagtttgcaaaagccagaggtgcaagaagcagcgactgcagcagcagcagcagcagcggcggtggcagcagcagcagcagcggcggcagcagcagcagcagcggaggcaccggtggcagcagcagcatcaccagcaacaacaacaaaaaaaaatcctcatcaaatcctcacctaagctttcagtgtatccagatccacatcttcactcaagccaggagagggaaagaggaaaggggggcaggaaaaaaaaaaaacccaacaacttagcggaaacttctcagagaatgctccaaaactcagcagtgcttctggtgctggtgatcagtgcttctgcaacccatgaggcggagcagaatgactctgtgagccccaggaaatcccgagtggcggctcaaaactcaggtaagcagcaaacccaagagcggtttctcccccaaagagctgtcctcatttgcctctcccttttgcaactgtgtctgtgacggctgatcttgataataaatgtgcttcatgcctgatggcaataaactgccagtgtaatccaatagccttaggcagtggagctcctttgtttaataaattgcatgcaactaaacgaagaagctggacgctctgctgagggtatttcattgcataagcctagcctgattgcctgaaatctggcacgtaccctcttggagggggaggggtgagaggggaggaaaggcttgaatgttggcatgcttcaaagcgctctctatactttccagaagctgatctaaggtaagacctggcttgtttgatgctgtccctcttcctttcctcttaagactctacctcttcacttcttgacttctctacctaagagaatacacagaaaagctccctcttcagactgattttcagaaccatagccctcaagtctgacaaatccagggcggattcagagaaaaccctatacatcccacccccaaccctgctgcctgtctccctcctggctctgtagggctccattcagtcgtccctgcagcccgtagccagagagcccctagaaaaaaaaaattgtgaaacgtagcagctgtttctccaagggtaaggtctcactttcgtcttgactcttggagcagttaattgtgcattatcttggcttctgaaggaaaagaatcattaggaagcctgcattgacacctctgcctcttgacttctctggctccacttgttccccttccaatactgccctctgtcctccaactgtcagcaaagaccggatcacaggtgtcaaaatgctgcagatgatgatccccttggaagagcacaggtccctgccgagaggagggcttttgcttcacttccttttgtacttagttgctatagagatgcagtgattcacaattcgagcttgcctaaaacaatagcagccctaatgcatattaaaactgcttaaagcaaagttataatttaaacccgtggaaatatataattagggaaatgacttgtaacatcctagaggctgcgggtggtgggagggggtggggaagactaactgaaccatgcttttgatctcagaggagaatcctatggcatgaaggctgcagatcattccttgcctagctgcctgccagaacaccccccttctgtgggagaaaaattacttttatgggagatcttatccagaatgtagaaagcctcatgcaagttttttgcggttttcttccagtcttgcatagggaggccttggcctggttattccacacctgtgtttcttctttctttctttctttctttctttcttttttaaaaggcttttaatatgaaagagattatgcatacctctaagcactgtcctagtggagggttggggtgaaacatgaacggatcagatttctttttgccaatatgacggtaagttaaaagcctgaaatcagaagggtctccaagtggactcctggcacagtcttctctgccatttagactaaaatcccatgctttttactcgggagtgcatttttccaaagctagatggattccctggcccttttacctcttaaacctgaccactagccactgtctccttccttcccatgctttcaagtgctaagcaatgacctttgattctatggaatggcttaaaggcactgtgcatttccagacttgagcctcacttctccagacaccaaaattgtaggtaatggtgaaacagggagcgtgtgtctgaaacagagaactccctccctgtccatcatgtactccagcaatcataaacaaaaggagcctgtctatcctctctttctcaatcaaatgggtctatcaattgcccctcatgacagattcctaggataagttcttctgacctcatgtccttgaaattcacctctgcacccacttgatcccacccagccattcctcactgtttgacccagaatggatggatttgtctctttcagctgaagtggttcgttgcctcaacagtgctctacaggtcggctgcggggcttttgcatgcctggaaaactccacctgtgacacagatgggatgtatgacatctgtaaatccttcttgtacagcgctgctaaatttgacactcaggtaataaaaccttgacccctgctcccactggctgcttgtctttaacagtgtgttagaccatggttcttaggaaccagtcttgtagggaaccagccctgcttctcagcttccccactctaaattcccatctcagcatgtgtatgcacaagtgtgtgcatgcacacacacacacacacacacacacagaggcactcatctggccaggaaataggttctgtataagacacgccccactcactctaatgcatgattctaaggagctagtagaggctgtcttataaggccaggggtaataagccaaaaagattttcctctgtaagaggacataaaaacgtgcatagagcaaggaagttctctctgcatgacctagcatactagcttttgatctgaattctcaaagtctcaatctcaagaatatgaagtcagattacgactatttttaagctgcagaatggttgatcacggttcatcttttttttctgtaatttcatttcggtagagcttaattctcaagggaatccagggagatggggagagggcttttttttttttcaatccttagccgagacatgcaatcttctcattgcaaggatatgcagatggccatgatacgttgcccagatgagcccccttaaattcctccatgtatatgcccatcctctttgtcaggtcaagctaaagacctccctcttgtccttcctccatggcagggaaaagcattcgtcaaagagagcttaaaatgcatcgccaacggggtcacctccaaggtcttcctcgccattcggaggtgctccactttccaaaggatgattgctgaggtgcaggaagagtgctacagcaagctgaatgtgtgcagcatcgccaagcggaaccctgaagccatcactgaggtcgtccagctgcccaatcacttctccaacaggtacaaactgagtctactttttcacaatcaggggactgggagcaggtggctggctggcagagccagactgggagggagggttaaattgccacagtcatgctcttattttagcttgcagtcttcccagcttttgcaggaaaaaaatatgtttgtgattggttgtgacagtttaagcagcttgggcttttttttccctactgttataggaaaagtcttttcatgcagctcatagaaagccagcctcatctgcagcatccctgggtgctttcattgaccattttttgccataagcctgaagggaatggtgaagtttctggaaacaagcttttaagacatcagatttggctgaaaccatgaccgtgcaacaacacaattggccatgattaaaaaaaaaaaaaaaaaaaaaagccctctggttaaatgtcataatgcagattttaagtctccatctatttcaaatcagtcccaaacacagtcagagatttcactgggtagcccagagcaagccatctcacttccctggggctcagatttcctttgtaaaaagcaaaatggctggactggaccattttcaggtttccttccaggccttatgttatcccattcctctagcccaagatttcctagaatgagtgtgttttatggctgtccagatcccattctcatcttagtattcaaacaccacccaaggccactgagctagtacagtaacatctgggcattgtacttttcagtgtttttaccagccaggagtgaattcctgttacatgagacagctggcatcctcagttcatgtgcgtggcctggaaaggttcccagcaagaactaagagatgccaatggggttggcgtggaggtctggcaggggcagtgcagaccggtcaagtttagccccctgtgatatccctcagcctaaaaacttgactcccagccttgaatttctatgattctttgactctccactcaaatctgcacatatccacaatgatcagtgctttgcatgttactctgaccacctgagagttatcacaggcttatctgattaatttcctagccaggtgccaccacccttcttaagacagtggcaacagccaagtccctctggggcttacaagtgatttagtcatgtacatacatgcaacaaaaaagtagttcctccttagggaaaggctaaggtgcctaacacaaacgctgtgtaaaatttctttttcacccttaactacaggtgagtgcccttcagaaccacaaatcaatttgtaaaaatcacttctctagtccttggaagtgactttatcatggggttctaaatggtttcctcagaacagaaaaatccaaccattttctcaagtgggctgtctctatataactcttggttttaaatttcccctaggaagattcttattgcacagaggaaacaggtgcagagggtggggaggggagatctgattaattattggagacttccttcaccattaggaaaagaaatgaagaattcttagccagacaggggctaaggacaaagtatgtgtttgtgtggtagttaggggtggggggagaggtacattagcaaagccactattacaatttagatccttaaggattctgtgacaaatcatgatctataatacggcatatttccaattttgaggcgatactaatctccctatttcatctgaagtagcatcttccattagaaaggcagagaggtctttaggcagaactatatagctactcgactagaggtcccaatttatctaagaagagactagtaaatttttaaccaggctattatttcttctaatcagtgccttattttcaacacctttagaaaatggtcacaaagaaagtcttcttatctccctctttcatcttagggactcattaggaaaggtcaattggagaaaaaaaaaatgtggccagcccttgaaaaccggaatcttccatgcaacctttctccaaaaatttcactttaacaggctatattattcctgctcaggattgtagaaatgtccggttccatgctgggcttgctttgctccattgaagctgctcaccttcctgagacatcctgctttcccagcctctatcccaccatagacacacgctaagtcagtgccaattggcacagaattgcaagaggaagtagttacaggttcattccaccttcctgtgacttatctagcatgagatttggggctgggagaatccaaaagcctgtgactggaccaggagccagaacaaggggattttccatgacagaaatgcacctagagggtaaagaggtagctggagtttccacctgcctgaatttgcagactatgctttcaaccctgtgggaagcaggcaaaattgatcaggccagcagggcggtgcgaggcttgggaaccacttagaccaacccagatccagagtgggaaaactgacaaagcttccaactctctagggcatggatagggaacaggaaacagaagaataatattgatcaagggaaacaaaggactatttataaaccctcacacagaacgttcctaggcagtatgtgtgtatttgggtaagcatggctgaaacagtagctatggagaatatctgatcttattctttatcaaaaaaaaaaaggtcagggatggaattttcaaagtgagaaaaaagaaacataattaaaaaggtcctttcgggctgggtgatcagaacacttagtccaccaagtctttccaacacatctcctccatcctccataaagataaagaaaggaatcttcttcttctttttttttttttttttttttttttttgacagagtatcgctctgttgcccaggctggagtacagtggtgagatctcagttcactgcaacctccatctcctgggttcaagcaattctcctgcctcagcctccagagtagctgggattacaagcactcaccaccacgcccagctaatttttgtatttttagtagagacagggtttcatcatgttggccgggctggtcttgaactcctgacctcaggtgatccacccatcttggcctcccaaagtgctgggactgcaggcatgagccaccatgcccagccaagaaaggaatcttcttaagcagtcctaactaccactgcaaaggaggggatgtaagcagagctgctctattttttgtaaaattgagaagaaaaatgtgtattgaatccctagaaacatagaatgtcatagttggagatgactgctgaggttaactagactaactgcctcattttactgattaaagaataaaggctcagagagtggagtgacctgctgaaggtcacacagcttgtgaataactaagttgggcttagaactcatgtggccttgagccaagctatttgatttctacttcaaaaatggcagccagcaaaatctgcaggaaatagccacaacccaaaaatagaataccaagcacaattgaatatatgtgcaccgtggtagtccacaattaaatttgcgtcctttctctcccaaaaggatggacacatcctaccaatagctataggaactataagaccatagcacaagaaggtgctcactaaataggtgacgattgctaagtcaactcttgctggagacacaacctcttaaataatccatctcacttagtgacacaggaaagggctatgtcattggcaagcatgatcccagaggtaaatggctattccagcccttactggacaggcactggttaacctattgctcatactgagaaactggtgacatcaaataatcctgacaaattttccagcctttgaagaactactaatggagacatggactttgttttatattctaaagagctttctcagcctgcccttgctgagttaacaaaagccccatgagggaaatagggtagattccagtgggggtgggtggttctcactaagagccctcaggctggcaagggtcactgtcaagaaacaccaaggtcaggtgtcatatctgagccagcagacaaagcaacagtaaaggtagaaaggtagaaaccctccaaaaaagagcaggcactctgacaaagtggggcctgaaggaaatgtatggccctgaagctgcaaagctggctgcagaagcttaattaccttaagggtactagacttctttgtccagacaagagctttcaagtccttctaaggaagaactagcatttctttttatccctttctagggaaagattgtattttccagcctatctggggactcatctggcatgaacagctctttctagaaatggaagggttaacttctaagttataaagtccttattggagggatgggagatcagaaaccacccaccaggatctaatcaccctctgaaatagacacagccatccaaagacccaggtcctagcagagcccaagagccaggtgatgcctggagatctatatgggtgtgtagatgtcagaagctgctggtgcaaagttgtttattctatgtttctccaaaactggttttctcctcatttccccatccaaaggagatctcctttgactcatgtgctttgtaattccaaagagttggacaatgttcctctgtgccagagagtcccagttttgaccacagctggatataattctccctggagggaagggtttcaccaggcctgtgtcagcaaccaagacactgcacttgcctctcagtccccagcttccttctgctgtgccacagaagggtgaccatatcacctcattacccacgttccatgctatttaccacacatctttgaaataacctctctgggggattaagttattctagaaagatgtttgatcctgtgcactgtttggtgagttaaaaataaacaggtttcttttcacggaagacctggtggccccagagatccttgggctcctctgagaaaaagttctctccatgtaaatactgcaggtcactgtcactgagtctcttattagcgaacacagaggtaatgggttttgacaactcaactgcgactacaaaatggaccaaatgcatcccagtctaaattggataatacctgaactgtcttcccaaataacaggacaagtcattgatatgccctaaatattagacagtttaatcctttctgagccacaaagcttagctacattgcttgggggtatttaaagaattcgctgcaaagatgaaggtaactgataccaaacacaaggggttttggtaaaatttactaaaactacagataagttttcttctgggaatcactacttattggagagaattatattcttaaaactccatttccttagtggctgcaaaataaatcaacaaatgtgcagtgatcaggcaatgtagcacgatggcaccgggccataaggaatacaaagaaggacacaaatcctgccttcagtaagcttacagtctagtcagcgaaagaaagccatcacaaaaccatcaaatgctggcctatgtgatggcaaacaaagatctataaatatccaaaaagggaagaggttagcaaactctggtatagtagaagaaggattcatgaattatagtagcatgaacccttaaaaaccaccaatatttccatttaaatagacttcttgcctaggatttggccttctgactacaatatacctttgaaggagggctgaagatggagtcagtcaatatcttttatcagggctgtccaagtatgtgataagggcattagattttgtagaaaaatgcatggcacacagaagagggggccttagacagaagtttcatcagaagatgcacagatctgcatacacacacacacacacacacctgtgcccacacaccaccaaaaaaaggaaaattacaaaaaagcatcaaaataattacacatgcatgtacaatggctactaatctcagtgatgagcattggactcacttcattctaatttgcttcacctcatccaccttagtttcttctctacaaaatgagagttgaactagtcaccaaatggtctctgtggtcccagctagctctgtaattctgtttctaaaaatgtcagtcaccacagtcagcctgctcttcaaagtgtgatctaaatctcctcaactctaaacatgaagatctgtcttgcattgtgtggtaaaccctaggagcagatgcattgaaactagggtgacatggcacaagggttagagagcaaaagccaccttcagctgatgaactattgatgtttgcatggtcaggccattagggactcgtgttggctagagcccgggtgaaagcctgggtctcgccgggctctcactgggtgaccaccatatgcactctctttcttgatgcagatactataacagacttgtccgaagcctgctggaatgtgatgaagacacagtcagcacaatcagagacagcctgatggagaaaattgggcctaacatggccagcctcttccacatcctgcagacagaccactgtgcccaaacacacccacgagctgacttcaacaggagacgcaccaatgagccgcagaagctgaaagtcctcctcaggaacctccgaggtgaggaggactctccctcccacatcaaacgcacatcccatgagagtgcataaccagggagaggttattcacaacctcaccaaactagtatcattttaggggtgttgacacaccagttttgagtgtactgtgcctggtttgatttttttaaagtagttcctattttctatcccccttaaagaaaattgcatgaaactaggcttctgtaatcaatatcccaacattctgcaatggcagcattcccaccaacaaaatccatgtgaccattctgcctctcctcaggagaaagtaccctcttttaccaacttcctctgccatgtttttcccctgctcccctgagaccacccccaaacacaaaacattcatgtaactctccagccattgtaatttgaagatgtggatccctttagaacggttgccccagtagagttagctgataaggaaactttatttaaatgcatgtcttaaatgctcataaagatgttaaatggaattcgtgttatgaatctgtgctggccatggacgaatatgaatgtcacatttgaattcttgatctctaatgagctagtgtcttatggtcttgatcctccaatgtctaattttctttccgacacatttaccaaattgcttgagcctggctgtccaaccagactttgagcctgcatcttcttgcatctaatgaaaaacaaaaagctaacatctttacgtactgtaactgctcagagctttaaaagtatctttaacaattgtcttaaaaccagagaatcttaaggtctaactgtggaatataaatagctgaaaactaatgtactgtacataaattccagaggactctgcttaaacaaagcagtatataataactttattgcatatagatttagttttgtaacttagctttatttttcttttcctgggaatggaataactatctcacttccagatatccacataaatgctccttgtggccttttttataactaagggggtagaagtagttttaattcaacatcaaaacttaagatgggcctgtatgagacaggaaaaaccaacaggtttatctgaaggaccccaggtaagatgttaatctcccagcccacctcaacccagaggctactcttgacttagacctatactgaaagatctctgtcacatccaactggaaattccaggaaccaaaaagagcatccctatgggcttggaccacttacagtgtgataaggcctactatacattaggaagtggcagttctttactcgtcccctttcatcggtgcctggtactctggcaaatgatgatggggtgggagactttccattaaatcaatcaggaatgagtcaatcagcctttaggtctttagtccgggggacttggggctgagagagtataaataaccctgggctgtccagccttaatagacttctcttacattttcgtcctgtagcacgctgcctgccaaagtagtcctggcagctggaccatctctgtaggatcgtaaaaaaatagaaaaaaagaaaaaaaaaagaaagaaagagggaaaaagagctggtggtttgatcatttctgccatgatgtttacaagatggcgaccaccaaagtcaaacgactaacctatctatgaacaacagtagtttctcagggtcactgtccttgaacccaacagtcccttatgagcgtcactgcccaccaaaggtcaatgtcaagagaggaagagagggaggaggggtaggactgcaggggccactccaaactcgcttaggtagaaactattggtgcttgactctcactaggctaaactcaagatttgaccaaatcgagtgatagggatcctggtgggaggagagagggcacatctccagaaaaatgaaaagcaatacaactttaccataaagcctttaaaaccagtaacgtgctgctcaaggaccaagagcaattgcagcagacccagcagcagcagcagcagcacaaacattgctgcctttgtccccacacagcctctaagcgtgctgacatcagattgttaagggcatttttatactcagaactgtcccatccccaggtccccaaacttatggacactgccttagcctcttggaaatcaggtagaccatattctaagttagactcttcccctccctcccacacttcccacccccaggcaaggctgacttctctgaatcagaaaagctattaaagtttgtgtgttgtgtccattttgcaaacccaactaagccaggaccccaatgcgacaagtagttcatgagtattcctagcaaatttctctctttcttcagttcagtagatttccttttttcttttctttttttttttttttttttttggctgtgacctcttcaaaccgtggtacccccccttttctccccacgatgatatctatatatgtatctacaatacatatatctacacatacagaaagaagcagttctcacaatgttgctagttttttgcttctctttcccccaccctactccctccaattcccccttaaacttccaaagcttcgtcttgtgtttgctgcagagtgattcgggggctgacctagaccagtttgcatgattcttctcttgtgatttggttgcactttagacatttttgtgccattatatttgcattatgtatttataatttaaatgatatttaggtttttggctgagtactggaataaacagtgagcatatctggtatatgtcattatttattgttaaattacatttttaagctccatgtgcatataaaggttatgaaacatatcatggtaatgacagatgcaagttattttatttgcttatttttataattaaagatgccatagcataatatgaagcctttggtgaattccttctaagataaaaataataataaagtgttacgttttattggtttcccccca

SEQ ID NO: 219 - DNA, 2155 bp, Homo sapiens
gtgaccggccaacactgagtgttgtctcgctctggcgtcagagccgtcgtggctcgttccattctcggcggtggtacctgctcccggtggccctgaggacgtgtgggccaggggcggccccgaaattaggaagcggagggggagcaggtaaggaacccggcggggggtccctggggttggtgtgagggagtggctccggcctgcggatgcccaccccgggggagccgtgcggagaagcaatcggtccgcgatgcagcccccgggccccgcggcgggcccgcgagccttccttgagcggagaggtgcccggcccggagggagccggcggtcctggggctacgacccttcggaaacacctgcctacgccatcagcgcaagcttttccgacacccctgccccgcacttcttggtgcagaaaatggtggtcagcttgcggggcggggcggctgaggcggggggcgagggtggcgaggagggccagggccagggccagggccagggcctcggggcggggcgggggaggggccggatggcggtagttcctagctagcgttctgctgcagcagcccccacttcccccaccccggcagtctgcaggtctgcggggctaagtgtcgcggcggcgcacctcgcgtcaagaatccggaggaggagactgcaaggataggcccaggtcggtgcgagggtcggtggtgaggcgggggccggaacgtgaggaaagcccagtctgagaccctaatccatgccttcaccctcgcccccctctaccccatgcaaccctccccttcccacacgccatcctcgtcctccattttgctgcctgcggaagcctggagatggatctacagggaaaatggtgggctttgcggaagggaggggctcggattgagggcaccccacagggcatactggcttctcaggtggaaaaaaatgaaatgttagagtataaagtcaagtccagggctctgaattttaaaaggtgcctagtagggcctctgtcctcagtgcttatcagtccaccaagaattcagcccattttctctctcttgtctcctaggagtaatggagtccaaagaggaactagcggcaaacaatctcaacggggaaaatgcccaacaagaaaacgaaggaggggagcaggcccccacgcagaatgaagaagaatcccgccatttgggagggggtgaaggccagaagcctggaggaaatatcaggcgggggcgagttaggcgacttgtccctaattttcgatgggccatacctaataggcatattgagcacaatgaagcgagagatgatgtagaaaggtttgtagggcagatgatggaaatcaagagaaagactagggaacagcagatgaggcactatatgcgcttccaaactcctgaacctgacaaccattatgacttttgcctcataccttgaatcctaaaagttttcgctgaggttaatgtgaacactgctttacaagcttgtatttttgtgatttactttttctgtaagccttttggggtttacacttaccagtttctaatggaaattagaattctaattgaatattgttttgtctcagcctaaaagttacggtcagcatggcaattcacctattttaggaaaaatactcttttcataatatgaaatgcataaagcagttcaaaaagcagtctgtattccatcatcttcctttttcattccagtccttatttttgtaagtattacttttcctcctccggctacctggactcaaaatctcagttgtctttgacagtttttttcttgtccctgaccaaaaaagaatgatcatacccagaattcaatgtttgatattttaagaatgtatgttctagtgtttttcagagtgagtctaccatctgtataaaaacaccttgggggcaggcaggggcatttaaaaatgtaggacctatcgtccagactcacagagtggggctccagaatctccatttttaacaaactctcttaagtaattctgatgtgtaccaaaatcagtgccattggtgtgtgtgtacgtaactatatacatatgtgtgtgtgtgtatatatataatgtgtcataaccgtaaacaataaacaatatcaagataaatctgactttgatgggcaagtaattaaaaaagaaaagtatgagaccttaaaa

SEQ ID NO: 220 - DNA, 131246 bp, Homo sapiens
gtcgctcgcgccgctgcgtgcggtgtggtgcgaggcgggtgcgccgggcggccgcggcgcggcgggaccatggagctcagagcgcagccccggcgccggcggcgggaccgcggaccggtgagtgagggctgcggtcgccccggctctccgctgtaggctgctgtggccctctcggctccgggccgggcggctgtcgggggaggggcggccccacggcgaactgaagttgctgcatcgccgcgcgctccggccgggcggcggggcccactgcgggctgcggcgccgcctcgcgcctatccctgcagcccggccgcattctcccggccggctcccgcgctggcaggggcttctcgccgtcacggcgcggccaggcggcccttctctcccgcgcctccgggcctccggccctttgccgtccggtgcgcgctccctggactcgggacagccacccgccctccccgccgtaagtggcgcccgggcctccgctcgcgccccacgcacgacgccccgggccgctccgcgtccgggaccttcgcatccgttcagtgtctgcgcgccctcgctggttctggtccagctccgcgtgccccccggccccattcggccctcgccgccctggcctgtgccctcttggtgcccgcgtgcgtgttggttgcgggcgtcctctccctcgaggctgcggtgccgcgtggctcccggcctcggagaccaggccggactcttggagtgcaggggaggaggtggggcggcccgcgagtgcgggggaccgcgcgcacggagccgcggcgcgcggggtatcatccccgggggtctttacccgcgcgcctgggctttagcgagggcagaagcttcctctcagtttgtggtgctgacgtgcaatggcgattgcttcttgatttggcccctctgcaagggagagttccctggtggagacgagagttcttaattattcagaaactatgtgatgggcttagggatcaatgggagcatcataggaattctttctcattttaaggttaatttttaaattagcggtttacttccagcaacagtctcgagttttcaaaaactgaaaattaaaaagactacttttcgcagttcttcaaattaaatgcatagcagaacatggtattttaagattcagagtctactttttataagggggagaggatagctatttgaaatattttgcatcttaaaaattaggtttatctaaagcttaaaatgcgactctatcaaaactaagttcaaagtattgtaattgactaatctttctattgtctctagggcaaattctattgcttctttttatatgtgctttacccaactctccttttctagcagttaaacaatgcagtggttctttaaagctagttcttttatctgcttgagaggttaaacaaacgaaagctgggtttgacctttcccaaaggcattctcattgtgtcctctccagctcccttctcccagggttctaatgacttcagtgtagtactcatttttcttcatcttgaaagattttcttagttggtattcacaaaagctgtgtcttttcacatgtttaaatattggaaagtttggtcaactattatatttaccttccaacctgtgcttattctagaactatgtacatatagaaattgttcttgcatttccagttggctgacatgaagttgcttaatagcatttgtttttaaaaaatctgtttgctttaaaatttacaacctaatagtcaatgatgtgcttcactatcttcaacaattacgaaaacaaaggtggaacacactttgctaagtggtcatgccaacattgtaacctcctatctcttgtcagtgtgtctttgtagtcacacgttacggttcccatagaaacctatgtatggcaggtaaccttttggttattgggatgttttgattaaaacaattgcgttataatgcaagtattaaatgaattgtccctactcacgggctagtactagtgatcgtctttggaattccaaggactttctttgaagagtactcccagattgtttttcactttgggtggctctccattgctgtagaccttgaatctctttttcttttcttttctttctttctttctttcttttttttttttttttttttttttttgagacggagtcttgctcttgtctcccagactggagtgcagtggtgtgatctcggctcactgcaacctccgcctcctgggttcaagcgattctcctgcctcagactcccgagtagctgggagtacaggcgcccgccaccatgcccggctaatttttgtacttttagtagagatgcagtttcaccatgttggacagattggtctcgaactcctgacctcaggttgatccgcccacctcggcctcccaaaatgctgggattacaggcgtgagccaccgctcccggccgaatctctcaacttctcttctcagtccgttttaagggccctgtttctttcaagtcaggctttttttggctttgctcttgggcatgtggaactaaatgcttctgacagccccacacattcttcttcagggctggttctttacctgtggcttgactttatgctggtaatacagaaatattttatgccagtaatacataaatgatgtacattataaaataaacaatatcaacacagagatttatagaggtaaaaagtcttaagttttctttttcccgtcttattgttgtcctattcctatttctttcttcagaggtaaccataatatagggtgtatccttctggattttttccatttaatactgtagatgaaatatataaccctgtatgttaaaaaaaccatttcatgaatgcctactaggtaccaggtactattttaatcactagggttgcaaaaataagagacagacgctttcaagatgttcatagtctaccaggacaagcaattacagtgcagtgtgataagtaccatgatagagtcagtaatcagtgagggatgtaggagcctcatgcatgacctaatccattcattcatttgctttattcattcagtacacttcagagttttaatatgtgccggggatacagagataaacaagacagatacctctgtcagcccccgatgagcttgctgtgcagttcagtctcaaagagttttaaccgttggttacaatgtattgtttgatatgggatctgaaaggggccagcaacaagagctcagaggaggaccataaacccaagcttagggacgttcagagagacaggaaagcctcccagaggaagcaccatgagaaggaattggtcgaagtctgggttgaggagagggtgtacagagagatggtcagggaggtgatgcactggagcaaccacaaacaccaggagttcagtccagtgggggtggttgtgggcaagggcagggaagtggcaagaagtgagggaggagaagtaaggagggactgtgccttgtggggtcttgtgattactgttgtgtggagttcggagacctctgtgggcaacaggaaatggttgaagaattgtaagcaaaagagggacacggtcaaatttgccctttggagaatggattagaagagggaaggcttgaagcagggaaatttgaggaggtagaattgctgggatttggtcattggccgtgtgtgtgtatgtggtggggggagttggggcagggaggagttcagggcagtgtccagctctggctgggtggttgggtgatggcactgtccttaggtggggacagagcagcatccattttggggaaaagattatgggtcacacttggctgggttaagtttcaggtgctgaggggacagtgtgttcagttggctgcactagggatccagataatcaggagttgtctggattagagagacgcatgtgagagttattagctgtcccagactgtctcaaacagtttgagagtttcccaaactatcagctaaggtgctacagcaaacagggagactgggggatgtttcacattgttgaggaaaacacatagttccgtctcttcaagcctgtggaaactactagctcaagatagttaaaaatgtctagattagattgcactccattccattcgatgacctcatgtttgtaaagaaggatttttggtggttgctgtagcacgtgaaaatcagtgtagaaaaggaaatgagggaggccattgtccagtctgactccaaggtttgagagaaattgtgcagtgctcaacaagtgtacacatactgtattagtaaatacttgtggttatctaagaatgaaataaaaatgccattttttctctctattaaagtgtacttttttcaagttggtaccaagttgttaggacattaagtacttacgtttttaacattttctttgctcaataagcatttgttttggcctgagactccaagggtgcggtgaacagagaaagttttggaactcctgcctttgcctgtgcagtatttgttaatggaagctgttggagtagatgaggtcatttgaggagtgtgtatagagtaagaaaaggagtggtgtggagtgagatctgaggcactcttgtgtttgaaagggaagcagataataggctcccacactgggactaagaaggatgggggtcatggtgtccgaggaaacctcagcaggcagggcgtgctcagctgctgcgagctgttagtaatacaggggacactagaggcaacagtgacatgacagggatgggagggggaggccagtttgtatcaggatttaatagtgagtgagagtgagggagtggagcccagcatgtgtagacagcaatgctcaagaaatttgatgctggtggttaggggtggttatagggagggcagataaagggggaaccctttggtttttgttttttaaatggggggatttgagcatgtttaaatgctggtaaagaaccaggagagggtaatttcagagtttccattggagttagcccactagatagcggtttcagagtttccattggagttagcctgaggacatgatgaatgatcttggtgaggagtctgtggaacctcattgctgtggattgcagagtgaagggtgttgagggagggaagctggttctttcccaaacttgattatgaagaggagagaatgacattaactggagaggggcatctggtgtaggctgatttcctcccctcccctcccctctcctcccctcctccctcccttccccttcgcctccctcccttttcttttcttttctcttttcttttcttttctttctagcagtgactttattttctcttttttttgctgttgtcttaagaacaccttttgtcttcctttctcaagacatgctcttctgaggactggttgttcctttgcagggcggttgcttcccaccctggacttttcctaggtgccattgtgtctccaggtcgtgatgtctttgtggctgactgtcctcctttgctgtcctgttctgacagaatactctctcctgtcagtgttttttctgctacttacctcagcaccagttttgtgtcagatcctatccgcctatcttcatagatgtttttatttttattttttgtagagatggtgttttgctatgttgcccaagctggtcttgaactcctgggctcaagcagtcctcccaccttggcctcccaaagtgttgcaccgcccccgatgtcatagatgtttatagattataataatttttccgcactaatgcctggtgtggtggctaacacctgtaatcccagcactttgggaggctgatcacctcaggtcaggagttcgagaacagcatggccaacatggcaaaaccctgtctctactaaaaatacaaaaattagccagttgtagtggcacacacctgtactcccagcttctagggagggtgaggcaggagaattgcttgaacccgggaggcagaggttgcagtgagctgagatcgtgccactgtactccagcctgggcaacagagtgagactccatctcaaaaaaaaaaaaaaaaaaaaaaaagaatagtttttccatacttagatttcagccttaatctttggagccaaagatgcttctgtttcttctctgtgcctgcacatgtgcctcttctctgggagattagctcttctgactttttttttttttaaattttaaaacattttaaacatcacagacattctagggtatttctcatcttttaggtctcctggagcttctaggccttggctctgagctcagcatctgggatgatttctcaactttgtactttctgaaatttccctgggatcttttctcagggtgccctctgaccttggagcagtggtcttgaaattgatctaaagatatcttctgttgtgttatatgttcttgaacctttttggtattttaatcttttcttccttttagtttttccttaaatacttaagtcagcccacacatgtttgtatgccaactatgtctgaggcactgttctagttagcagtgataagaatgtttaacatgaccaagctgctgccctcagaaagcttatattcaagtgaggtaaaacaggatagattatcttgctaactagttcacaaactccttgttggcaggaaccacatagggtggtgccttgtatataatctgtgcatagcatatgtgtgttccagcttgtcagataacctcttgaacgtcgtcgtcatatagagaccttcatttaggttttgcacttatttcactgtggtaacacttggtgccttctcccactggctgtcctctcacagcctttgtgatctttgatcttggaatgcttgttttctagcagttgaaagctgaattgaatttttaaaagttcctctagtgcatgctgaagattttattagcttgctgcggcagttccattttagttcctctcatagcatcctctcattgagagctgttatccattttgtgctcttgagaagctccgtgaaattatattgcagtaccaaagtataggtgtgattaactgtgaactggaatcagtgtggccattattttatcagctaaatggatgaagtggttcattcttggcacgtagtagatactcaacaagtatttttacattgactgaaaatgttatgtgttttgattcatggttatataataagcaggacttgatcactactgggtagtttacacagtatggtctgagccatgttgctctactaccatcacttattttccaacttctcaaaatatgtacatgacaaggttgtggtttttttttttttttttttttttgcctgttttgttacatagtcctgtgttaggatattacctaggcaggtttcagctctgagttggctttgcagctctttgctggggcatagtctatcctaatgttagaattaatgtttggtagacacagggtctcactctgttgcccagactgtaggccgtggtgctatctcggcttgaaaccgggaggtggtggctgcagtgaggtgagatcacaccactgtactccagcctgggcaaaagagtgagactcggtctcagaaagaaaaaaaaaaaaaagaattaatgtttatagaagggctcatgaatttcaaaacttgcttcctgtggtacacgggagaaactctagtacaagttgaggggtgccattaaccagaaagatggtaaagagagagggggcaacttacaagtatgtttatattgttctgagagaggttgtggctgttgcacagcttagaatgggaaggaagagactgactttacatgccttcaaaagtaagatcttaactttggcagaaatactataattttccaatatagaacacgtctgttttcaatataaatgtaaaaacacatttaaaaaaaaccagccctgtaggatttaaaacgtatctccattcttggttttctgtagtatttgtcatatattgtttagagttaatcatcctggcttttgatcagaaacccagaaatacacagtaaccccctaattccccaaacacctgtcttgagattttaattcttgctgcaaacagcatttgtttcccaaggcttctctagaatgtgaattgttctttgagatatcccagggaggaagattattaaaaggttactccttttcaaaagttggcattgcaatttagaatggttacaaagtttatcaatgaaaatgaacttgatgcctgagctataattgaaatctttatagcgtctctgctgtttgtccattgtgttacagagcattcattgaaaacttcttccatttctgacatgtccagttcccacccctcaaaaaaaaattatgaaaactacaaaacttcagaacatcatttgaaataattgtgtagggattaggcaccgaagagtttagaacagctgcgttacattaagctataattatggttactttttcttgccacacaggagtttagaaatttgtggttttatttcttaggctattttgtttctgatgattgtcaaatttcatttgagacaatattgccctgcattttaatatttacttagcattttttctctttttgaacagttacataacttagataaactgtgtgtaaatgaaagttacagatagagttttaagtggaatatgtactttattcagatttttattatttgagatgatgatttattgaacataagcaatggagacttttctctcatctgtcattaaatgaatgtctggattagcttataggaagtgctcacagtaataaagctaaatataaagaatgagaatcaagaatatataaagaccagaaatgaatacatcaaaacctgtactatcaataaagttctagtctccgtggtcagtgtcttagacatgaggactgctttaataactgcaagatttcagtgactcagagcaagaagcatctgtttctcacctatgtggaagcttatgttggggtcgtcatgggttaggtgtccacatggctgttcaggtggtcagcctttttccaccttgtgacttagcctcctataggaactgggaacctgcttggttcaggcagtgggtggagaatgaggacagtcctgtgggaggtttttatagaccagcacacattgcttctcatcctactagccgtactcagacatggcctctcttagcttactttaggctggacacatagcagagctatacgccgcaggagaagagaggtcatggggactggtagcataactagtctctaccccagtctgactggaacttgtgtgagcatcctggtggccacagtgaaaggaaatcatcctcagctctatgctgtcattttcaccatgcataaagaagataccagtttcttttccttaatatgtcccccatttcacacttggggctttgaattggttacattgaaaggtgtagtaggtgatgtgctcagtggcattcatgtggtacattgaacagtggttcttgtttggctgtttatcatgtccttaaataaagtgaaagtacaacaatcaaaaacaattctgtggaggatcaaactgacatggtttattatatattttctagttgtgagaataagcacacttcatatccctcaaacagtcattcaggaatataagtgatctcaggtggattttttggtgaaagatgtatagaagatagtttgaagttactgttacagatgcgcttggagtgccagtattttgtcaattaaaggtggctttagagaccgagagagatggttggttagttcaaaatcagtatcctgcatggcaagcttgttctagatcaggggttggtaaactacagcctgtgggccacatctggctctttgcctgattttgcaaggaaaattgtattggaatacagacgtgtttgttcttttatttgtctggggttgctttagtgctgcaaggcagagctgatataggggtaagtggtggcaacagaggctaacttacacagtacgacatatttgctatctggctctttacagtaaaaattcctgacccttgttttggagaacatattttctgccttttctgatggggctcacattgtagtaggtgagaaagctaataaacgacattaaaaaaaaaatatatatatatataatctcccttcacttgctttgctttctttactatgctttctttagtatacagcctatgtgtatgtgtgtgcgtgtatttatacgtgtatatatacgtgtgtgtgtatatatatataaagaaagcgaagcacgtgaagagagagaatatcagagactgccatttttgataaggtggtcagggaagcctatgtgagatgacatttgagcagagatacaaacgaaagtgaaggagtgaaccagctaggcaaatattttgggaatgaaccttatttggggagaaacagcaagtgcccccttgagataccgagtagcagcagggagggcagtgtgaatagggggttgggtagggggatgcgtagtgacagaggtattaaagggccagattgtgtagggccgtatagactgtggtgcactttggattttattctgagtgagatgaaaaaccattgcaaagttttgagcagggacatgataccatttaagttagattgtaagaggatcactaggactgctgtgtagaggatagacaggggacaaaggtagaaggtgggtgtctgtgtgctctgtgtgctaggtaggcattgcgaagtgctgtggctgttggatgaatcagtggttcctgccttgaggaggtcttagtagaatagcagaagaaagagatcactgtaatgcactgctgctgacagagaagcaaaggtgccctgggatggggtaggaggggtacctgatccaaaccaaaggtgacaccttgacctgagaatttagagggggctgatgaagactctgattgtatatcagagctctgagattcttggaaggactacttgcatgcaggaattttccccacctgttaaccacgtgagcaagtgctcatccagagatgagtggtttggtggcttttaggtcacatgccagtgccaacaattgcagtctggagcattgtgttagagtgatgttaaggtggtatctcagctcagcaggatacaccacaggaactgaagggtgaaatatttgccatctttgccagagagcagaaccaaagtaattttggtttgggaaagttagtaccataggactgtagaaaagtctcagtaaattgtctgtggaatgtattgtagagtattgctactttccccgtatgcctggcagtatgaattagttgcacaatgtacgtctcagtaattaagcaaaccggtctgctgtctggagttattggatatgacccaattaaactttggaggatgtctgtaaaaatgattttatttttgggacaggtgatagtaaagtattttggataattagttgaaaaaattgctgccgttttaaattagtgtagaagaggacattcacctttctgttttctataatggggtgtctagatcatctagagagaattttaattatcataatattggtttaaaaagaagtagggagagaaaataaaatcacaatcatagaggaaagtttttttttgtactttctctgcaactgatagaacaaaggatatagatgatttgaacaaaacaattaataaaattgcctcagtgtgtctagctgttgtacctaatggcagaatgcacattctttgtaagtagactggacagtatctatcagcttgttgggaaaagcaagtttgagtatattttagaagattgaattcgaacagagtgttctataaattaaactaaaatcaatagcaaaaggtagctagaaaaccttttctaagtatcccatgatcaaagaagatattacggtgagaattagaaaattttacaaaatatgttgattagaatcaatatgaaaatactgtatataaaaatttgtgaggtgcagctaaagtcatactcagaggaaagattatagccttacatgcatgtgttaggaaagaagaaagcctgaaaaatactcaatgatgtgaacatcaattttaagaagttagaaaggaacagcatactaaacccagaggaagtagatagacattaaacgaggagaaattgatagaatagaaaataaatatacagtagagaacatctgcagtactagttttattgaaaagattgatgatatcaatcaatttggtgagattaataaattaaaataaaagacggaaggcacagataacaatgtcagccatgaaaaagagaacatcctaaaatatcctacaggcggtaaagatttttaacaagatattcatttatgctaatacatttttaactttagattaaatggacaagtttttccttaaatgtggttttgttattcatttaaattataccttgatcagccgggcgcggtggctcatgcctttaatcccagcactttgggaggccaaggtgggcggatcacttgaggtcaggagtttgagaccagcctggccaatgtggtgaaaccccatctctactaaaattacaaaaaaattagccgggtgtcgtggcaggcgcctgtaattccagctacgtgggaggctgaggcaggagaatcgcttgaacctgggaggtggaggttgcagtgagctgagatcctgccactgcactgcagcctgggggacaagagcaaaactgcgtctcaaaaaaacaaaaaattacaccttgatcatttgttttagggtccttgttgatttgattttctttttaacataatctaatacaaaactacaaaaaccgtagtttcagagaagtgtcactccctctcatatccctttgactgtgtcctttctccctcttgtaaataaccagcctcacttttctagtttcttttaagacagtatacatgtatgttttcttatttacctttttttcaaaaacagaaggtggcatactgtttaaattctgttgcactttgctttttttcacttaaaatatactctagaaattaattactctttatcagattccagagctcttcctcataatgttatagctgtatagtgctgttcacatagtgtgaatatgatgcagtttcgttaccagtcttctgtgtttggacatttaggtagcttccaatattttgcaattacagtacaaataatgtggctatgaataaccttgtgtatgtatttttatattgcaggaggtttaatttgggaataaagtcctcaaatttggatttctgggttgaaggataaatgtatatgtaatcttgttagacgctgctgaattccccttcatagagattgtaccattttgcattactctgagcagtgtgtgagtgcccgtttctttatagcctgctagttagaggatattgtgaagctttcaaatttttgccaatctaataggtgaaaaatctttgtgtagtttaattatatttattttctttattatgactaaagttgaggatcttttatgttcaagggaaatttttatattattttgagaattgtctattgcccttttttctatagaatttttgcaccttttctgttcattttttaaaagtttttctttgccttaggaataatattcctttgatatatgttacaatatttctcctagttttgacttttctgatttttttccccatgaaaatatcttcatgtagtcagatttatcaagcttttctttaattgaattgggcatgggttttgagtcaaggtcagattatttatagagggattcaccaatattttattctagtacttgagtagttttcattttttacatttagatttatgatacgctacaaatttattctgatatatatggtgtgaggaatagatctgattttgtcttcttctgaatagtgattgagttgtaccaacaccatttataaagttcatctttacccagttattagtgatgccaccattgctgtatattagatttctgtatgtagctgggtctatttttgggcgttccattccattctgttgttctgtctgttcatatgctattcacacaattttaatcatgaggctttgttttaatatttggaaagggcatttctccctcttagctcctcccttgcacatttactgagctggtcttttgtgtttgcttttccacatgaacttcagcatcaatttgttgagctccattaaaaagctgtgtaatttttattggaattgctttatatttacaaatcaactctgacaacctgatgaagttgtgatgtcttagccaagaacagtcgaatgttcgtctgctttcatgtgcctttcagatgtgtataaatttatagatttctttgtataggttttgaacatttcttattgtttattcctgagtattttgttgctgttataaatgggactttctgttccattttacattctaactggttattctttgtgtatgtgaagactagtttgtttactttatatcttgctaccttgcttaattctttaattgtttgagttaattttgtcattgattcctggagtttttcaggtttactaacatgtcatcaaccactagagagttgttgttctttttttccattgtttgtgcctttaattgttttctgttgtctaattgccttggtgaataccttcagaaaaatgttaaatagtggaaaaggtagtgggcattcgtatctggttcctgaccttaatgagaatgtgtgtagaatttgccctttaggatgttggcacttgcactcaccgtgtgtatgtgcgtgcatgcacatgctcttacactaattcattcttgttctgtcttaagttatgttaagaaagtatgcgtctactcctatttattctatatatatattaggaatgaatactgaattttgttgagggcttttttggcctcctgtggaggcaattatatgactttcttgttagacttatgaatatggtgaattatattactagatttcctaatcggaatcattattgcattcctggtataaactccttttttgaggtggagttttgctctgtcgcccaggctggagtacagtggcacgatctcggctcactgcaacctcggcctcccagattcaagcgattctgccgagtagctgagactataggcacgtaccaccatgctgggctaatttttgtatttttagtagagatggggtttcaccatgttggccaggctgatcatgaactcctgacttcaagtgatccgcctgcctcagcctcccaaagtgctgggattacaggcgggagccaccgcgcctggcctggtataaactcttaatgtggtgttggagtctgttaatattttatttcagaatttggcattaatattcatatgtgatattggtttgtaatgttcctattttgtgtgatcacagtcaggttcagttattaatattacacttgatttataaaaaaggatttggcaatattttttcatgtttaaaaaaattgatgtaatattgggattatctggtttgtataggtttgatagacttgcctcttgatatcatctgggttttttgggggagggtagtttgataacttttttcagttcttctatggaatttagttggcctaagctttctatctctatgggtgtccatttgggtaaactctgttttcctatgaaattatccatttcatctaggcttttaaattcatttccatagaggtgtacagagtactttcctgtgattaatatattttatcttttttgtatttgtgcatttgctcatttttccttgataaacttagattgtgctttatttcagttttttttgaggtaaaatatacataacattaagtttatggttttaaccatttttaagtgcacagttcattttatcctttgctgtgcagaagctttttaatttgatgcaatcccatttgtttatttttgcttttgtttccttgattactactttaaatgtgttctatggactctgatgtataggttctcattatctctcagaaattcagtcatttgtttgtatatcccttttcacccaagagttgtataaatttttaggtggaaaggcttttttgttcttaatttctagttttattttccttgatttaattactagtattattatttttgtatattttactgatatgaatacagaaaagtctacatcagaagtatagttgaattttcacaaaatgaattcatccatgaaaccagtactcagaccattcccagaacttcagaaggccctcacattcccttcatctcatgcccacccctctccaaaggtaaccactaagttgacttctaatattgagttttgtctgcttttgaactttacagaaataaatcattattatgtagttttgtttttaaatctttcattcaacaagttttgttaaattcatctgttatttttgctgtataattttccattgtataactgtaccactgttcatttgtccacctctccttacagtatttgtatcattttcagtgttttgtatttctagttttgtttttgcactgtgatcagaggatattttttgtgatatttccattttatgaacatagtaatgatttctttgtgccttaacatataattttctgtgagtgttcaagaagctatattctctgttaccagagtggagtgctgtctctctctctatatatacagaacaactactttgttggttatattgttgaaatcatttatatcttttttttcctatgctctgctttgtatcaagtagtgtgttttatttatggtgtgtttctatttatttactcttggatcaggcataatttgttatttagttcatagagattaataatgtattctgcattgtgaaattaacttttagtatttaaaagtagttaggactattcagataacttttgtcttgattttttttttgtctgattatttttattcacctggtaaatttttgttcctttatttttagcctttttgaatcactgcattttaagtatgtcttttatatacagcatagtctttgctttctaagcaaatttgaaaatatctttcttttaataagcaagttaagctgattcatattaattgttataactgataggtttgttctcagttctgtcattgtgttaaattactgtctgtattttggtatatttactctgttcatttattgtttgatgtgtttttcttaatttaaaaaattcttttgatatcaggaaggtgggactaagtttttcttctaatagtaccattgaattcgtacttttgtagtaccttaaccccttcttttttttttttttgagatggagtctcgctgtgtcacccaggctggagtgcagtggtgcgatctcggctcactgcaagctgcacctcctgggttcacaccattgtcctgcctcagcctctggagtagctgggactacaggcacctgccaccacgcccggctaattttttgtatttttactagagacggggttacactgtgttagccaggatggtctcgatctcctgaccttgtgatccgcccaccttggcctcccacagcgctgggattacaggcgtgagccaccgtgcttggccaaccccttcttatttttaacctatctttttactgtcttgtatgctacttttataaggcatcttttccttctcatctgttcacgatacaatcacctatgattgtatggcttttttttctttcctttttctcttccctttcctcccattatttcagttgcattttcaaatcttttcaggacatatacagtttatgtatcatttttctgtcttgtttttattcttagttctacagttaaatacataaaatgcttactttgtgaccagtccttttgcttacgtttctttagtcatcccttgtttagatggagctcaagcccggatgttccattgaatgtaatgtgtcagtgtctctcctgtgcatctaggattctattagttgtataatgttcttggcagaactgagaacatagttagcctgtggtccagatgatgaacctgggttgagaaagggattagaaccctcaggaaagatacatgtgtaagtattttatgagttcttgcttgttcaaagtttttttattagcctcgttagttgaaggacaggtaggcttgatatacaatcctttttactgagcttcttttcttatttttagtatttatttatttgagacaggttctagaatgattttctactagtcttgctttttatgttgctttgctaagtctgatgccaggctgattcattctctgatatcattctgtgatatcttttagcatggaggcctcgaagatatctttcatatgcgtaaagtctaatagtttactaggttacatttttggggtagtttgttcttggtcagttttccccagttggctcttaaaatgtgtagattcaggtcttttattttcaggaagtttttttagagtattattttaaatattctgttttagtgttttgaatatcttcttccagagtttgatgtatatgtatcttggaggtatatgtatttctaattatataaatatttgaccctctttgcctaatttgttttattcacttcaactttgaccctttatacttctttttaaatttcactttcttatggttgtttttctacttttcctcaatgccctttgtaaaattttcatttgaatctattattctcccttggacatcttaattccttctctactatgactttttctttcttttgtttctttcctgggttcaagccactcctgtttcattactttctttttttttccttttctatttttactcttctttggggtcttgaactgtaagaggtcctggaacataaatttgagaattgttgcatcatacagtagtggtttacgtggggaatttcagaagtactgaggcctttgacctagcctcagaaattgcagtggtctgaagtggtacgtgggctttgaatattttaaatgatagccaggagattgtaatgtttaggaacttcactgagatatagtttggagtgtggtacatcatgtgcttatgtaacttatgtacttactatctcaaaaaaggtctaagtcagtggttcccaagttttcagagaagagtcatctgaagatcatattcatttttcatagtttgttgttagtatgtagaattacagttaactttaaaaataactttattgtggaacaataatagactcattggaaatgcaaaaatagttcacagaggttctatgtattctttacccagcttcctccagtggtaacatcctacgtaactatagtataatatcaaaaccgcccttttggctctctgagcagcaccatggctgttggcaagaacaaacgccttacgaaaggaggcaaaaagggagccaagaagaaagtggttgatccattttctaagaaagagtggtatgatgtgaaagcaccttctgtgttcaatataaggaatattggaaagatgctagtcaccaggacccaaggaaacaaaattgcatctgatggcctcaagggtcatgtgtttgaagtgagtcttgctgatttgcagaaagatgagattgcatttagaaaattcaagctgattactgaagatgttcagggcaaaaacttcctaacttccttggcatggatcttacctgtgacaaaatgtgttccatggtcaaaaaatggcagacagtgattaaagctcatgttgatgtcaggactaccgatggttacttgctttgtctgttctgtgttggttttcctaaaaacaatgtaacaatccgatatggaaaaccttttatgctcagcaccaacaggtccgccaaatccggaagaatatgatggaaatcaagacccgggaggtgcagaaaaatgacttgaaagaagtggtcaataaattgattccagacagcattggaaaagacatagaaaagacttgccaatccatttatcctctccatgatgtcttcgttagaaaagtaaaaatgctgaagaagcccaagtttgaattgggaaaactcatggagcttcatggtgaaggcagtagttctggaaaagccactgggagcaagacaggtgctaaagttgaatgagctgatggatatgaaccaccagtccaagaatctgtttaaagttcagacttataataatggcaagtaaaaagtcctatttgtggaaaaaaaaaaatcaaaaccaggaaattgacattggtacaatctgcagaccttattcagatttcactagtttatacatgcactcagttgtgtgttctgtgcaatttaatcatgtgtataggttcatgtaatcactaccacatcaagttacagaactgttccatcagcacagaggaactcccttaggtttcctctttgtagtcactacagttgatttctttatattaatttgtatcatgtgactttgttgaatttgtcttttaattctagtagttttattgtggattccttagacttttttttatgtataggatcataaaatgtggtaatcatgaaattgactagcaagacaattttacctcttttccaatctagatactttctcctcctttccccccttcttttctttcctcctgccttattgcactggatagaacttcctttagaatattgcgtagaaattataagattagatattcctcccttgttcctgatttcagggggaaagcattcagtccttcaacattaagtgtgattttagttgttttcttgtagacgacttaccaggttgaaaaatttttcttctaagtctaggagtttttaatcactgtgataagtttaataaagttgctaccttagcattcattttaggcctaacataaattgttcgtaattcagtcatgccctgtcacctttggcctagttagaacttcccctccctgcagttgtttgcaatatggcctacttgtgcctcatctcactgacccaaaatgcaacacaccatgagctgccgatcacagtaaaacctaatggtcagcctcagaagtcatgtgaataagttcccattcacatttgttttctttaaccaattcacaagaaggaaagcataaggaataatgtcccttaaaggtgtagttccacagttcttctttctccctctccctcctgctccttccctctcctgtctcaggacctcctgtctgtctctgtttggcactctaacctctctgggacctatgagtaataaacttctttcgtttcatgtattttgccttagcttcctcattgtgtctccattgagacacacatactgtattgttcttgatatcatttaacatcttttctttaacaaatcaacagtcatgaatggatattggattttgggaaatgctttttctattgagatgatcatgtgattttgtcctttatgatagtagttattatattgatttttggagattaagctaaccttatattcttgggatacatttcctttttttttttttttttttttttgtgggtcagggtcttgctctgttgcacaggctggagagcagtggtgcaatcatagctcactgtaaccccaaactccgggctcaggtgagcctcccacctcagcctcctgagtagcttggactactggtgtgtgccactaggaccagcgaattttttaagtttttttttaaagatggggtctcactatgctgctgaggctggtcttgaacccctggcttcaagtggtcctcttgccttaaggagagagaaactagattaaaatacaaaagtaaatacccaagcctagagaaggggaaagatagtgatgactattattaacaaattaattatagtaattattattttttgcttaccattagttaattttggatagcagacacatacattcaaatattttaatagtccatgaaatatataggtgggtagtctggttctagacacatgttaagctgaagtgccaaggataggaagtaaggttgaaagtagtggcattcttttactgaaaagacatttactttttgggttgttttgcaggtataatggtatctcatctacattgtcactttgcctagtttactattttgttttttgtttgtttcagtgaattcctgaaagagaaaaaataaacaacatgattctctctgtaacagccccctggaccccctcacccagtgttcagcatgatatagacccttgtgtttaccctttttttaaaaccaggaaatggcgctcctggtgtttggtgtgagcactgattatgcttggtcatcagaaatgaatgaactggcaagggaaatgaataaatgagctcagagaaagcaaaactgaatcatgctgaagatgctttctaggatgattgtatttctgaaaccttaaatcaagcttgtccaacctatggcccatgggctgcatgtggcccagaatggctttgaatgcagcccaacacaaatttgtaaattttcttagaacattacaagatttttttgtgatttatttattatttacttatttttagctcattagctgtctttagtgttagtgttagtgtattttatgtgtggcccaagacaattcttcttccagtgtggcccagggaagccaaaagattggacacccctgccttagatattgaaaattagaggtgcctgcatttccagtaattaagacaattcttactgtgcatttttttgctttccattatctttcattaaaaaaatctccaacttttaccttttagaatattaggatagaatcttattaatatgaatacgtccaaaagttggcttttgtggttttcttttgtcagaagtgctgtaggataatataacttaaaacacatacagttttctgcttctctcaagatgttcagttgtttttcagaaacacctgaatgaatggtgctaaactttccatgggctttgtctaaaactcgacaagcattagattaatatttcttttgtaggtccaattagcattcaaatattattcctgaagtattggatttcatatgttattttttgttgcttgttgatattttggttttattttgggggctgcctaattctcaggtcaaattatttctggtagttttgaaatttcttttttctttctttttttttttttttgagacagagtttttgctcttgttgctcagactggagtgcgatggcacgatctcggctcacctcaacctccgcctcccgggttcaagcgattcttctgcctcagcctcccgagtagctgggattacaggcgtgtgccaccacacccggctaattttatatttttagtagagatggagtttctccatgttggtcaggttggtctcgagctcccgacctcaggtgatctgcccagctcggcctcccaaagtgttgggattacaggcgtgagccactgcacccagcataaatttcttttttttttttttttaaggcaaggtcacactcctgtcacccaagctggggtgcagtggtacaatcttggctcactgcaagcttgacttctgggatcagttgatccccccacctcagcctcctgagtagctgggattacaggcatgtaccaccatgcctggctaattttttgtatttttagaagagatggggttttgccatgttgcccaggctggtcttgaactcttgagctcaagtgatctgcctgtcttggcctcccaaaatgctgggattataggtgtgagccactatacctggtcaaatttcttttttttaagattattttgaaagtatcggttgtgataaaatgaggaaaccatatgtgaatggatggaatgtggtgtcttttcctaagttgaatagaatttgattaatctgactatcctcagaagattttgcaaatttcatttaaatttaagttaacagaatttctgaagtagtaatctgaggagttaacctaggccagccaattttttttttttttaacagttgaatgaatagaaatccagaaaagtttgagttgagcaaggcattttgatctatttccccacagaaatcagtgggaaaactttcacttttgttccaatcagagcaactcccttttagttgtttagtgttttgattaaagttttattttaagaaaggttctgctttaaaaaaaaaagttacaaaaccactgcttttaaggggaagggatcccaaataagtatgagtggaaagctatcagagtctcttggcttttttaaaaaattagcgcctactagagagtctttccttgacagttatttgctataaactaggctttgatatgatcagaatagaaggcatcatttggagtatcaaatacagaggaaaataaagtgattcttcagcctttgctttggcatagaatgttaccaggtatggacttaactatgtttgctgaaattattttcaggttttagagtcaggaatgaaggaacattccttgagtatttgatagatttgtggtttatagacagtaaattctataatcgatgagcttcctctttagaagttcttgaaccaaatttatggttcactgtaagccagtgtataggatttaaaaggatgagtctttgcatgagtctgatttctaactcatttgatacttctttttcacttccaataaatgttatcttgctttctgaacaaagtaggttatacataaatgcaattacatacggatggttcctgactatacctacacccttgtgtaggtttcaggctctggactggatgctctgttgcctctaagacctgatgggacaggtcaggagcaggggctttggggccagactgatttgtgttcaaatcttgactctgttgtttattagctgtgtgattcggggacatttcttaacttctgtgatccttgatttcctaatctaaaaaagaaagccgggccgggcacggtggctcacacctgtaatcctagcactttgggaggccgaggtgggcggattgcctgagctcaggagttcgagaacagcctgggcaacacagtgaaaaccctgtctctactaaaatacaaaaaattagctaggtgtggtggtgtgcacctgtagtcccagttactcgggaggctgaggcaggagaattgcttgaacccgggaggtggaggttgcagtgagccgagatcataccactacactctagcctgggtgaccgagtgagactccgtctcaaaaaaaaaaaaaaaaaaaaaaagcctacctcacagtgttgtacttaaagagtatacttaagtaagagaatgtaaataataaagtgcttagtactgtaccgagaatagaaaatttcccagtaactggcagagtaaagaaagcagcaatagagagaaaatccctaagaaaccttcagatctgtatgtgtgttctgagaccataccttggaagagagggcaaaaacaatgtaggtctctttttccagctattaacatatattctaataggatagataccttgagagaataattagtcaataagaaagataatgacaggcacctctatggatgcttaaaatgggggcagaaagaaattaatgctaaagtggtaatttgaagcctagggtcttagtggaaagatagcaatagccatggtaaagcagtttggacagttactgtggatagcatctatcacttttgataagagtacatgtttgcataatgatttatgggttaagtgtctttagttatgtgatctcatttgatgtatacaacaccataaggtggcttattattcagatgacactggtcacatggggacaagttccaaagggagcaagcaaggacagaaaaaacaattattttccgtaatggttaagaaacggaaaggttcttatagtcacaaatggcaagtgaacagtaaagctggttcaagaaatcctgattctagtctagggctccttctcctatagtgtttattattttgtttttactcaaaatggaaatacttaaagatgcagagtagttcataattagagtaggcagaagtgggggtgaagctaagagtcgaaggctccttaagcccaagtaggagttattttctgctaggtagtgtctttcattgaaaattccttatttcattgaaaatttttttaaattatgaatttgattatattacttgttatttctttgaaccatttttcagaagaatgaccctgagcacactctgctatggtgtttgtactttaccctctgtatttcatttctagaacatccttttcccacttcttttagcttcgaccatcttttgaagccactctagctttgttggagtttgctttgtgatcaggaggctacctaaagcctgtttcagtctcttcaaatagctacagcagcggcagatagtaacaggagtcagaagtgtggttgccactcaagtagcccaaaaaggtttgcagtgcagaagctgaaatggcttaccacagatgtgatccacttaaaaaggttctgaaaactcaattcagtgaagtgtgtttgggctcagtgcattggacctgtgacttcctgtaatgtttacttaaccccctaacttctaagtggtacctcccccacctccctggaggggaaaaagatacgcaattggttttgcaggattatggagatcaaacaagcatctaacaaagactcttccttccaggtacctctttctctcttccctctcatcatagattaatcacttagttgcaagggaccagtaaattaacagaatggtgaacattttccttttcttggtgcttttgctggatgactagtggtttctgctggaacagagatgaaccatctcaaggttatgaaaattcctgactgtggcaaatgtgaaagagtgtctttttaattcctgggaaatactaagacttcttctctaaggtgcttatttgtaaagtaaaaaggtgaccttaatttccagtgctatgcagtgaacacaatttttgtggaaactagttctaggatttgaaatgaagactatatggtctctgttaatctgtattggtaaacgcactgcactttattgagagttctggtcgttaaccagcggaattactagtattatagaaatttattaaggatggcttattggagttgacttgtaatttcagtcatttctttgtaattacgaggtaaaagatgatttgtcttgagtttaattatttctgtaagttaaaataaggaatttgtaaagcattcctcagttttatgttcagttatctaggaaacatgcagcaaagaaaggatgtgagataattattcagaaattttagttgctcgtggttgtgtgttgaaggcatatacgtgacaagcagttttggaatttcttgcaaagtcagtattgccctatagattgaccttacagaaagtccttattgtgtgtttcaaagtcttctttgtaaattaaaatatgaaagctgttgttactctgctgatagttctgataactcatgctaactaaatagttaagggagtggaagaatacagccagcattccatcatctggaaggaaaatagtgaggtggcagatccctgcctgactcagctttcaccatgccataaataatatcattttcccaagcaatactgtggaatgcaaaaagaaagaaaaatgtaaaaaaaaaaaaagtggactgagatgaagaaagccaatttatagttgtaataaataatattttgtgtcaaaaaggaagaacaaattgacaagaacttggagaaataccagctatggataaagggaaataaaaatgatggaaatccagatggtatagaactaaagatccaaatgtaaacagcagctgtttacattaattatcttgtggatggagtccctcactgagctgatatgctgttacgttagtgctttcaggttttgggttgaatcacttaggtatgcctacacacttgctttgagaaaaatcatatggttagctgtgctttccttaataatgataagttaaataactataattttactatactcagtcatatggagagatttgaagactgaagtataattctgtgttactgctagttggtaagcagatgtccctacctcatggtctctttgactaagttagattgtaagcctctggaaggcagaagactgttcttcatctcaggtttggcataatgcctttcatatagtaggggctcaggaatctctgttgatgttataaatttgataagtgttcactgctgaacctgcatgttgatggtaagaccatataatggtcttacctagaaaaaccatataatggtcttacctagaaaaaccttttgacttgtattgctttgctctatcttctgctgaaattaaactataaaccccccaaatgcataataaaagcccttgccttgctgtgtggctgacagtttctaatgtgagtggaggtaatagctgaggatggtgctgtagaaaacttacctcataggcctaggaaagaaaggtttaaggctatcatcatggattctgttagatgacttgatttttactgtattaaaagcttcctttccagtgatttgggattgcatggaatagagtgctgtacttgggtgtcacagaaccctgggtttgtggatagaattatgatgccccaaaaatacctcatttgatatataatcttgattttgtttatagaattttctgtaatgaagtaatatttgatttttttcaagtagtttaatatttgccctttattgtttttcaataatattttgaaagacgttttcttcttcaagattgttaaaaatattttttgtgtttcttttcgctctttattggttttattttgcacatttttgctgttaatacatctgaaacttcttttggtataaggggtaaagtgaggactcaatttgatttttttctcctaatgagtatccagttgttataatagcatttaaccaataactcttaccctagggatttaaaatgtcacatccatcttatactgagttcctatatatactgccagtttctgcattttctagtctattccattataggtttatttattcacactattttaattattgaagctatataatgttttaatatctgataggggatgttctctacccttattcttctttttcagaattgtcttgtctgtctttgtttgcttttctataagaactttcaagtaagcttgtctagttcctaagagaattgtcagggatactcaagaaacacctgccctttgtgatcaattctaagagccccatctgtattataaatctggagactgggttttagaccttattctgacattaactggctctgtaataaaaagattaaattcatgttttactattttatagatgtttgcaggtgcttttaagagagttattttgtactgacaatttttttggtttctatattctcatcactaaatagagctattttaaaaatcctcaatttcagtctggtcaacatggcgaaaccctgtctttaccaaaaatacaaaaaattagccaggtgtggtggcacacacctgtagtcctggctacttgggaggttgaggtgggcggatcacttgagcctgggaggtggaggttgcagtgagccaggattgtgccactacactgtagcctgggcgacagattaagaccctgcctcaaaaaaaaaaaaaaaaaaaaaaggaagaagaatcctcagttttctttttaaaaagaatcctcattttttttgctttttttttttggtggtttgtttgttttttagtattgcagaggggtcctcatacttggaaaaattggaaacaactgaattagagttccctaaactctgttttttttttttgaaaattcaattctaaataaataaaaggtggtgtatcatcaatccaatcaaggattgaatttaaatctttgtggcctctgaaagggctacacagtggagggaaactacagaaatggctcttggcaagatcatttgtctgtttcttttcctctataaccagttggtgttttgaaaggaagcatattgtctagattttcagagttctctaaaaacaggatggaggagtattatttttgaagtatgtagcatgattgtatcttcagcacaattaagtgctttgaaagcttaaattatttgtgctgtcataattgactattatgattgaaataaggatgtatatcttctttgctttttgagtgttgctagattgagagctgctggacagaatgatgggttcatgggagaagacaatcaagggggtggtaattctctaaagtcaaacttgacattttgaagggcacatcagtctgtagcttgtataattctgtaacaaattggaaaataatggaacaaatgaagaggaaaaattggtcttcatctgttggtgaatgtcagtcactattaaattaaaatgagtttttaaaatgaagagaccaaaagttttttttgtctcttttggaaagttacattgagaattcattgatttatgattgctataggacttaaaaagaaaaaagactaaaaaatccaaaaccaaatcctaaagaaaagtttaccagcaactccataatcccatcaagaataatattctgaagtagagggcaaggtttggaattggttgactctagttacacaagactcagtctattaaataactgtaaataatgttcttaagcagaagtaaatgtgataaatcagataagctgatagaaattactattcttcaaatcagaaagatgagaaggaaggttaggaaaaacaagaatataagcaaaaaataaccctagagtgtaagtctgaaaaattcagagtgggagttggtttattgaatcctcaaatgctgtttgtttgtatgctaaatggaaatagaggcagcataacttaatgtgatgtgaggtttatgttttcactgtttaaaaacacaacatgaccagaccaaatcagaaccacagagtcccaattccagatttctgggagggaaacctggcccattttaggtagtgtctgtccccattcagtcagctgtggccaggaggttggggtaagagattaaaccttacttgtgtttttaccaaagtcaaatagtatccccaaatcggcttctgtttcagttatcatcacagattacattttaggaaatgtgtatatatttttcttctggattctaatttgatcttgtcgaacgttttgtagttttaaaatgcgtaacagtttacttcctccagtaaagtgtcagagagtacctgtgtccctccccatcctggccaacaccgggatttttcatatgtttaatctttgctcatctaacaagttaaaatggtatggcattgcagctctaatttgtatttcttctataatttatttatttttttaagacagtctcactctgtcacccaggctggagcgcagtggcatgattatggctcactgcagccttgacctcctgggctcaagtgattctcccacctcagcctcccaagtggctggggccacaggcacacaccaccacacccagctattttttttttggtagagatggcgtttcaccatgttgccgaggctagtctcaaactcttgggctcaaatgaccctcttgcctcagtctctcaaagtgctgggattataggcacgagctactgtgcctggccctgtatttctttatattgcttgaggttgagcattcttccatgtctgcttttcaaatactcagtagatggatagttacttcgttcctttctgtttttgttcaaccaaataggtagactgtggggcattttgtgagagtattagtttggaagaagtttcaacttgttctatcagacatgaagtttagcactaaaaatggttcctctcagaactgggtaatgtggagtggagggggcagtgcctggagagcattgaaggaagaagtggccactgaacagggtgtcatgttgggaattgctgtgattgcaagatatcagaactttactgcaaattgagcccagcagggatgggcaaccatatggcttagaaagtgacttatgtaggcaagtggtaaagtcttactgaggtttagtgatgcaagcctgatgtggcatcgtcaatagatgcatttgtttgaggagtcttgctgttttggctttagttgaatgttaagaataaaattggtaccatgttaatacttttagaatgatttttgactatatctagtatttaaagcttttctttagttatttctccaaagcacaacagagtttggcagatttatgtgtgaacttaaaataaaataaaagataatgctgttagtgtagtttggggtgtaggataccttctgcctctgagggaatgttagacctcatgctttggattgttttgaacagaggtaaacatactcaatttgactagatgtatctgtagattttaatgttagtgagcagtgctgtcctgcttcttgtgttagtttcttgaatggccaccccccattgctggacttacgccagggcagaagaaggttcacctcatgagctcagtgtacaggaaggaatggaaaacatgaacatgcttttgcttttctatgtgtaacttccccttcccctttgaaaccaattcttttggaaagctgcaactgaagacccatatctgaatagcattctaacagtatttctcattaatatgctttgtcagtcctcagtttgtaagacattgtcagaatgttcttggtttgaagcctggatgctttcatttcccatcgcgctaatttccatcctgttaattttttattcgtgaccctctgctgagaggcccccccaacacctgttaaatcacagagaaaaaagtaaaatttgtggtatttttagttatttctgtactaataagattgccacctcttaactctttgtaaaaatgtaacatggtatttactttaactccagtaatagttttgaattttgacctttttttatttgagaaaaaagaaacccgaaagaaggtggaaaatagattatttggttaaaatttctttttctctttaaatgtctttactcctacagatgtcacctttaaatgtgagtcttaaaccagaaatatgccctataaatctactcacaaaagtaatctggatgggatttaagcccaggcagatctcaatgagattgttaggtgagatcaccaagggagggcacacagagaaagggtccaaatcaatatgtcaaaagtctgctaagctaatatttctctgcgttcttctatgtaaaatgtgggaataaaatgccacatacactttttatcctttcagcagtgagttattgcacacctactgtgttccatgcactgatctgggcactgggacacatcagtgaacaaaacctcaaaaaaatccctgccctcacaaagctgacattttaatgggagaattgggcagtaaaggagacaaattaataaattattcacatgtagcatattagaagataatagatggtaatggagagaactaaatcatttaaaaagggtaaggaggttcaggacttgcagttttaattggggtgaggcagaagtaatatttgggcagagatttgaaggaggtgtgagggactgagccacgcaggtgtaggtgggtggggcggaacattccaggagagatggtagcaagtgcaaaggtcttggtgggctgctctctagtgtgtgtgttcagggaggagacctgcagtagaatgaggaggggagagggagagagtaagagatgaggacagagtggttaggggagggaaggaagcaggtcatgtggctctcttaggtcatcgtaaaggttttagattttcatcacactgtgtgtgctgaacggccaccagagggtttgaaatggaagagagatgtgatccaacttctttgacagaaatgctctagcttctcaggaaaacagtctgttggggaacagagaataaagtggagaccagccgggaggcttgggtgaggatgcaagcagttgaggtgggggaagcagtaggattttgatgtatttagaaggtggaaacactagtaggatttactggtggatctgacagtgagggagggaaattaaggatgcccagggtttttgacttgagcagctgagatatggggttgccatgaactgagagggggagactacgagctctagattgctggggaacgtcaggagttcaattttgggcatgttatatttcatattagggttgtgtattagacatccacgtgaagacactgagttagctgttgagtatacagtttcaaagttcatggaagtggtctgggctggagatgggaatttgggagttgtcaggatatatgtggcatttaaaaccatgagatcaggaaaggagggagtcgggatagagaagagaaaaggtccgaggactgagttgtaggttcttgaggtcggggatgctttaggaacggctgggcactggtgactattacttggtcaccccttaaggtacttgcatccctgccgggctcactgtggggtgttaatcccagtgcactcagctgttatttcagaatggatgtctaactggaaagatactaggtagtcattcaaaaggacctcaaaggagcaggcgagtttttttttttttttttttgctttctaccgcagtgattctagattattttgggctttgcttgatttctggaccaataagctttgctgaactgcagttttaatgaagttcatgatatcaccaatctctacaaagtgatttatttaactaatctctaataataaaatatttcaacctgacagctgactttttaagaagcatgtgattaatagtagtttgagtgataattaattttcaggaaagattccagaatattggaaatatttttgtttttttgcgggagtgaatctgttttatttatgaattttatggtaattttaccttacagtgtgtcttagctcaggctgcgtaacaaaataccacagactgtatagcttaaacaacagagatttattttctcatagttctggaggctatgaagtccacgaacacagttccagcagggttcagttcctggtgagggccatctttctggtttacctgcgagttctttgtcctcagatggcctttcttctgagtgggtgcagagagtgtgagtttggtgtctcttcttctaaggccataggtcccataggatccagctcccaccctatgacctcatttaaccttaattaccactataaaggccctacctccaaatgcatcacattagggttgggagcttccacatgattttggtggattatatacaattcagtgtataatacaatgtcttctcaatttctctccctctaatatgaagacattcttatcagtgtcttgtcagttgtctgttccagggtaattttttcaggataaatgtcattgagctgtgtatgcgtgtgcctgtctctgtgggttaagcatacatggattattttctaaggtcatttctgtaatgatacacaacttgtggcaatatttacagtgattttcttcacaaatgtttttgcacaaatgtttaagcagtctaatatttttatttcaggaattggtttttgggtttctgtagcatttgagtactgtttctaggggatgttaacggtttttagggagtccctgccgtgcaatattggttcagtgaatggatgaataaacttaggtgaatgtatgtgggtggggagtgggggcgttgtactgtaatgaaagtggaaatgtaaaaaatatcatcttagcttgtttatggaagggtcatttatcttgcaaaattttctacctttagcattactgaggaattcattttggtccaaaccgacttggccgaagcatgggcttccctcagcgtactgcttgccggtgcctcctgagttttttggtttgagggtgagaaagatgaaaggttatgaaagttctgtcttgtgaatatgctgaagatcaaatcataaagtgtccactctgtttataatttcacctttatttttctaggccatttaccaagccacctgaaatttgctttgttttaaattattgttattattatttactgttagtcttgtgctttatgtctttaaatttaacttcaggtatttttatgtaattgataatattcttttgtcactgttttgtgtgccttagcatttatttcatgtcatattttcttgcagatttatttatttgctctttttgagtcacattccagtggaatccaaggtccataaaaacaaggaattgtctgccttttactgcattttatattcagcacttaggtactagcatatagtaggtatccaataaatattcttgcataaataaatcctatagacactactttgcatgcttttccatttagtgtcatgtcagaaaaatgttatcacataattaacaagtcttctaaaatactgcataggtcattgcataataatttatagctctaacatagtttgctttaaatcagttccttcctttggctgatttagttgcttctgtgttttattacatacataacactgaagggaacatcttcgtgtataaatctttgtccacatttgtgttcattcctttattcatatattactgtattactagaagaagaattagttacattgatttaggtaatttaaggctcttaacatataatgacaacaaaagtattccaatttatactttttaaaatataaattttcaaagggcctttttctcctggaatttcattcttaatactattttcttctcattttgtatttactccccttggccataccatcaaatgctcttctattctagtccttcagttccagcgagggctaatttatggcctctgctccaaggtctaactctgcatttgttagatatctggtggttcccccggtacctcaagatcaccatctccaaaagtgtaattatttttccatcaaaacctgctctttgctgttctgttcccttttgagataaatgaaggtaaaatcttttcagcactcaagctggaattgtgggagtgatcgtcagttcctccgtttcctcttgatcctcagctaacttgtatatgccctttgactcttgcgctcctggctgcagcagtggcctaagcttactaccgtctcctttctggacgattgtattactgccctgttgtagctcctgtatcactttccccgtgtacatcattcatactgccaaagttacctccctggaacgcctgttttctattcctttcctaagtaaattaagttccttccaactctcccggttacttgtagatcctccttatttaacaggggctctgtgtgctctgcctagtccttccctagtctgccttctgtcatttcctggggatttttcttccttctccttcttgggtatcttgaccttttggagctccacattgtctgtcttcctcattcactcctctgtggctgctctctggcagacttctttgtctagaatactgtccctcagttgttcgtttaacattcatcttcagattcagctctgggaagtctttctttacctaccatttcccaacaacaacttccttttctgtataaccaccagcagtgtataagtaccttgataacgtagtcttcaatgtcatttgttgctaatatttatgtgtatgtttgtatcatagacagtatgagtgttatttatctttgatcccatggcacttaccataaagacttgcagaaaagatatttaacaaatgttagttgaacaaaggaatatctcaggaggaacgtactttgacttgatgtctttttggtgttctttcttcctgtttctgtctgatattgtttccattcagtctgaagaacttcagcatctttttaaatatggatctgctcagctttggcttatcagaaaatgtctattttgccttcctttttaaatattaaaccttttatttttatatagtaataatctcacagaacatggcaaaaaagaagttcacagttccatgtacccttgcccagcttccccaaaggtgacatcttttatagcttgtagtacaataccaaaaccaataaattgatactggtacgtactaacgaccttattcactgttcactgtattttaaactgcaggtgtgtgtgtgtgagtgtgtaaagttctctgcagttttagcacatgtgtagattcgtataaccgctgccaccttcaagatacagtactgtcccatcaccacaaaatctcccttgtgcaatttctttgtaccctcagccatcctattccttgtccctggcccctgttcttcatctctattagttgtatcattttcagaatgttacatacatgaaatcataccatatttaacctttgtgattacttttttcactaagcaaaatgtctttgaggtctgtccgggttgttttatgtatcaattgttcattcctttgtattgctgagcagtttacaattgtatggatataccagagttggttcaacaatccacgcaaacaacatttgcattgtttctgctattttgctattatgagtaaagctgctatggacatttgtgtacaggtttttctatgaatatattttctctgggataaatacccatgaatgtgattattggaaagtgaatctttagttttgtaagaatgtgccaaactattttccagagtagctgtactattttacattttcaccagcagtgtgtaagtgatccttttttttttttttttttgcatcctcaccagactttggtattatcactgtttattttaactgttctaacctgaataatgatatctcattgtggttttaatttgcattcttctaatgcctaataatgttgaccatcttttcttctgcttatttgccgtctgtatatcctctttggtgaaatgtttattttttttttgctcttttcataattggattgtttacttttttttttaaaaaaagctagttttgagagttctctctctagtttttttcattagacaaagaatcttgtatgacagtcattttccccacacctcagcattctaaacatgtcagttcatcatattctgactttaattatttttgataaaatttagccttcttaaatgttgcccttattgcagttttctgcaagtcatatgtctcattttcctctggttgctttgagtattttctctttgtctttggtttttagcaatttggctatgatgtgcctaggtgtgatttttctttgtgtttactatctttgggtttaatgagcttcttcgatctgtgggttgatgtccttcattacatttggaaaattatcagattattatttcttaagatatcttttatccggttctctccttgtcttctgggactccagtatattcaagccatttattatttctcagctcttgggcagtttccttgtttgttttccatttttctctctctgcagctcatagaaccaccttctgctatgtccagttttctgttaagctcatcgaatgagttctttctttctgaaattgtaatttccatttctggcttttctatttacctattttgttattttactctgatgaaatcttccaactgctcatgttcacctgctcatctttctcactaagtcttttagtacatttatcatagttatgtctactggttgcaacatcaggatcatatatggatgtaccctctgttgactttttaaaaatggaccatgtttgtctcctccttgtgtcccattatttctatttattattattatttttttgagacatctcactctgtcacccaggctggagtgcagtggtgcaatctcatcccactgcaacctctgcctcctggctttaagccattcttatgcctcagcctcctgagtagttggaattaacaggtgtgtgccaccacacccggctaatgttttgtatttttagtagagatggggcttcgccatgttggccaggctgatctcgaactcctggcttcaagtgatctgcccgcctgggcctccgaaagtgctgggattacaggcgtgagccaccacgcctggccccttgattttttgttgttgttgttgttgttgttgtttttacgttttagtcttttttttttattatactttaagttttagggtacatgtgcacaacgtgcaggtttgttacatatgtatatatgtgccatgttggtgtgctgcacccattaacttgtcatttaacatgttaatgctatccctctgccttcccccagaacaggccccggtgtgtgatgttccccttcctgtgtccatgtgttctcattgttcaattcccacctatgagtgagaacgtgcggtgtttggttttttgtccttgcgatagtttgctgagaatgatagtttccagcttcatccatgtccctacaaaggacatgaactcgtcattttttatggctgcatagtattccatggtgtatatgtgccacattttcttaatccagtctatcattgttggacatttggcctggttccaagtctttgctattgtgaatagtgccgcaataaacatacgtgtgcatgtgtctttatagcagcatgatttataatcctttgggtatatacccagtaatgggattgctgggtcaaatggtatttctagttcaagatccctgaggaatcgccacactgacttccacaatagttgaactagtttacagtcccaccaacagtgtaaaagtgtttctgtttctccacatcctctccagcacctgttgtttcctgtctttctaatgatcgccattctaaccggtatgagatggtatctcattgtggttttgatttgcatttctctgatggccagtgatgatgagcgttttttcatgtgtcttttggctgcataaatgtcttcttttgagaagtgtctgttcatatcctttgcccactttttgatggggttgtttttttcttgtaaatttgtttgagttcattgtagattctggatattagccctttgtcagatgagtagattgcaaaaattttctcccattctgtagtgcctcttcactctgatggtagttccttttgctgtgcagaagctcttcggcccgatgattttttattgtttgctggacattaagaacaagaaagactgaggaatatctatcccggcaaaaggcttgctcttccttttgtcacactgttaatgagggggactgagctggatctgggctttgaagtagcattaattagagtcagtttaccattggattcacatagtttgagagtgggatcacgagtttgttttcggcagttttcactccgaaccccagtaagatcttggagatctctttatgcttcagagccaagctgccagcttcctgagtggtgggagatttctctttgttttatagcttggctgctagcctttctggacagtggtgagttatttatactctttcgatggctttcagctcctcagaaggtatctctttgccctgctctttttaattttatttattattatttattttttgagacggagtctcgctctgttgcccagactggagtgcactggcacgatcttggctcgctgcatcctctgtctccagggttcaaacgattctcctgccttagcctcatgagtagctgggattacacatgcatgccaccgcgcctggctaatttttgtatttttagtagagacagggcttcgccatgttggtctcgaactcctgacctcgggtgattcacccgtcttggtctcccaaagtgctgggattacaggcgtcagccgctgcgcctggcctgccctgctcttcttttcatttctttttttttttttttttgagacggagtcttgctctgtcacccaggctggagtgcagtggctgatctcgactcacagcaacctctgcctcctgagttcaagcagttctcctgcctcagcctctggtgaagctgggattacaggtgcctgccaccaagcccggctaattttctgtattttttgtagagatggtaaaagctgatttctgtccacttacttgccttcctcctggtgtcaggctgctgctctgcatctagggacttcacaggtgcctgacgtgacataggggctctctcagctctcctgccctagcaccttgtgcactacccatgtgtatttgattaaggcccacaggaaagagttggcaagtggatgcagatttgctgtgttttggggctcctggagattctaatctatcatttcagctcacatggagacattaaaagtttgttaacagttcagctggtatcttcttacccttatctattggcagattctttgtctttccaccactttgccacagatgaaaacagctgtggattactactttgcctatgaaggccttcttgatatctgatacttacttcctgtaggtttctttgtgttctatccacattttctaaatcctggggcaaattgtctctgtgtaatgttatagaatggaggttacagtcatcccatgggatttgattcattgaggcaaagtggataaaatatttccaaaaggcatcatttctaagtggactggggagttcacaccttggctttgccacttagagctttgtagtagtattcagttactctctgaaagtactgctttgttaattggaggttaaaacacccacatctgtcatcctctttgggctccgaagattaaatgatgcagaagtacaaagtaaacttcccagggcttgagtggtttgactaggattactgtaggaaagattttgagatttacctttaatggtagagtgggcagtaaggtgagtgggatggatacaggatggctttacatttcctgagctgtctttacagcaagattatatttcatttcaaataaaagaagagaaggctagtggttaaaagcatggtctctgaaaaaaggttttctaggtttgactctcaactctattatgtactgtgtgacctggggcaagccacttcacttctctgtttcttagttcctttgtttgtaaaatggggatattaatagttcctacttcataggattgctatgaggaccaagtgagaggctaagaatgtaaagcagagttctggctcagcatggcaggctcagtagcagtgaagtacattgcttctcattttttcctttctggttgctctcatgtcagggcagggcagagacaatcctggttagcttttcatcccagcagagaattcagatacaaatcctgattaagaaggtgtatttagtaagatgtttcacaatgctcatgggagctggggtgtctccgttctgctgttggttggttagtactggaggccagatgttttagctcctctttcatgactttaatcttgtgttggattcatcaccaaaagacgaacaggagcatccgctctgcattacttattacctccaagaagaaacactgtcgcagcactgtagaatgttaatgtctcttccctacacaccctctctccacctctccacttctgtctttcctcctttccttagttgtgggaatgtggtatatagtcagggtgatttctttgtggcagggtagagatgattagcaatttggttctcttaggttgaaaatgcttacatttataggttatatagtagatagagccatgctgtgttgaaatctcatggttttgtgggtttatatagtgtattttcagcacttttaggtgcaataacattcacttgctttcagatgtattttaaaaattgctgattacttttgtattaagatttgaggtcattaattttaagcagattgataaaaatggtacttaatctctgtgtatttggtatgtgaattacgtagcatttattttaggaaatttccatggaattccatttatctcagcagttttgaggggagaagataatactgtagatgtaacttactggagtgctttaattttaattctgttgactgtctctgtgtataggtttattaccactttaatttcttcagtttactttgtatgtggagttctatagtcatttaatcattattcctgtgctcaaggttctacagagatgaggcctgcctttgggctcttctagactttgaaagaagcatcttgtcactggagtatggatgatgggggatgatggagaggataggggcagaatctggatcttggtaccctcctgccttcagggttgacagattcagctggcattttatgcagaattcaagttattaacagaaaactctacaagagcaaatgaagctttagttaaataaacatgaggatttcaaatatcagaatatcaactgtttggaatatctacattcctgtaccctttcagtgagtaaattggccataattatctttatttgtagaaaacaaagaggtgctggttcagggatatgtgatatattggccactggcctcaagcatgagttttgtcatttggagacagatcagtgctgccacctaacctcaaagaatgaggatgtggcctgtcatctgcatacacaaatgcaaagatatcatcacttcctttttgccaagagtgggctgagtaaatttgccagattgtggtgattgtgcttgtctgccgacagggagcatgttttgcttttagttgtccagggataataactgccggttattaaatgcctctgctaccttgctgtgttctttgtccataagacttcatcctccccttcacattttaaggggaggtatggttagctttatttttataaaaggggagcttgagactcaaacagtactaactcttccaaggtccagagcttttcgatggtagttccggggtggaactcagatctctgacccccatacctctgatctttcccctttaccatgcagcctctgggcttcagaaaatgtttcctacaggattatattggatgccactgattaaatgattactgctacttaattaattggagatagaatttgatgctagaaatgtttttggcaataatgagttacttaggtgactgaacttttacatttatttctaggaggtcattttttccttgtttttgttcgtttgtatcttctctcataaattgtagtattcttgtggcatgatggtgggccatttagttccctgattactttagatatagtgagttaggttttgactagaggctcaggagctttgaatgtagacatgttgtaaaaatggtactgctgtgtttgtcagttttgtttgaacacataggatcccctgtgggtacaggtttatgaatctctttgttatagtggccactattatactttatcctcagagagagaaaaagaaaaactgaagttatttgttgaattgcacatgaaatctttatgtcaggtttagtattatagaggtaattttgaaatatagtttgattttggagtatttaaaaattgtcatggtaataatgaaaaaaatacctctgcaatgcagtatttacatcttgctatttctatttgataatgtacagattttctgtatatttcgtgcacttatgtcatgattttcattattttctttgtccaaatgtaagactcaacacatttaatgaaactaagtggaaatcctgatctggttatgatctaacccgttggtatccaacagattgctgactgtgtagtattttagcccaggatatttgtcacctgatttttaagtctgagcttgaagaggaaggcgataagggcccatggggaggtaagagtaactgctgttggtacctctgttaaatttgtctttctcctgaaatagctgtggaagtgtggagctgcaggtataagctgaaggtaaaaaagacagcactattcttcttctggccagttgtagaaagctcagcagcttcttgtgtcggggcctgggtggtaccttttgtaggggttggactgtagttaatgtgaggacagattagaaaatctggtttcagagagcaaggtgaggctggaagttaaaggtgttccagcacctgaacaggaaccaggtgaatattcaggaatcaaggtaggtcaaatcaaggaaataaaaacacaaataactagttgtttggttgagcaggtgctcaggaggcaataggaagtcagagaccagggatgggatataggcatgggagaaaggcagagactcaaaccagtaaaggatataaagcaactttaagcacagttaagaaaacctcttttgggctgtgtgtggtggttcacacctataatcttggcatttgggaggctgaggcaggaggatcacttgaggccagagtttgagaccagcctgggcagcacagtgagactctgtgtctctctactaaaaatatttgtaaaaaactttaaaaaagggaaacctcttttatacttatttatgatggcctgtgaacaacttcaaggattttctggttggagacaggatggtggggccaaagctaagggtaatgccctggtttggttgctgaaattaaggaaagaaagacatttgtctaccaggtgattcataggtggcatgataaacagtagtttaatgtatagagttgagaagacaaaacacaggcctctgaaggtaaatcccagtggaaagtagcatgtgttgggtttcacactggtgatactcctagtgagttctgttggagttaggagggtggggtgatctagctaggttggtgtggtcctgcagccatagtgaagaagatagagtcagtcatagaaggagtggagtttggaataaaccttgggacttaggtgagatagatgtaggtgagtgtgtcttccacctgtatttactgtgtgattttttttggatgagtcttccattagactgtttcctaatttgcaagatagttaaactaattcctaccttgcaggtgtcaaggttgtaggggattaaatgagatgatttatgtgaaagccctttgtaaatggcactgtggattcagatgtaagttgttattaataaattgccagttgcaatggggagcctgttggataagagctttaattcattcatcatatgtaaatgaggtggtactctttgcaatcaaagctgtttaatgaaggtcatgattagggggaaagagtcaggcggctgtttttaagtaaggttggtgtatgcctgagatttcacttataaacttataaatacataattagtattgaaaattactgtttaatgtgcatccgaagtgctttgcatttttttggttgataaaaataaatgtatttgaagagtaagttactgaactataaaaaaaagaaggagtccatttagtagcaaaattacacgatgcttctcattctacattctgaaataggctatttttagcatctctttgaatcagggatgaattctagttatagggttcagtaattaaagcagagaaaaatacaaagtagtttgggcaagaaaatctttttacttgggttggatttgtttcaaggtttaaactgtcatctcaagggcctccctggaagccactgtttttgtaatctttgtggggtcaagagcaacagaaagtgccaaaagatcagccaaggacacagtgtcccacttttttagaacaggggagttttaaaacttctggaatcctggtatttcataactggtgatcttgtatctgtgttctctgcacaatcctggacagaggcgccagggtcctttggtctctccctgtctttcctgtcctcaggcccttccttctggtcagtgcttccaccctcaggacctctgcccctctgtccagctgccctgctggcccctggttttcctccagttctcagtctgcctttgagtattgctaaagaaaactgcttaatgatgcccttggtaccagtccacatttgtatttaatgatggtagattattcagaatgttgctgaatagcttctttacttggttctagtcagcagtctttgctcaagctggaagccttgttttatcatgagaaagttattattattttatctttttatgcccgttacaaagaagctcattaactgtttggtggagttgaaacaactgttgattcaaattctcatgctcatgcttgtgtggcacttaaaagtggtgatcacagaggcaactcagggtcactaaatacggggcaagttcagcttttctagttgaagtagattaggaagatgcatttttttttaaacctctgcatttggggaaaaaaaataactttcacaaatgtttttgagtgttgtctatgtgccaagtattgtgccaagtgctggaattaaaaagaaaaagatttgtcacagtgaagaatggaattagggatcaaagtattaggatccacaggtggctgcccggggccagacctgtctactgtgaacattaaaaaacgaagcttaactgttacccgaaggcagaaacatcgattagataatcgagttttcctttggaaaccaattatatttactacggatttctaaccattttcaacctctaaatttttttatttctagtagttcactttttgttgtggtaatgaataactaggcaaatgcaagagtagaactcaatttgaacttaaatcatcttggttttaggtttttgtttgctcatttgtttactatttgttttgttctgaatccacattgattgagagggtgccatgaattcctttctgtgtgaaaccctgggattggtactgagatgcagtgaacatgccccagctctggtgggttgttcaggctggtggggcggcacctggtggtgcagtaacagtacttggtgctctttattgcttgctaaatgaggtagacggctcttcccatgggttagctcatttaattctcacagtctaatttttgtagttagggaaacttaggtttaaataaactgctcagagttttctgtagcctcacaggagacagacaggtggatacacacacactttatttcaggagcaagttctccatctggagctgtttgactttctcttttttcttttctcttttttttcgtgtgtgtgtgtgtgtgtgtgtgtgtgtgtgtgtgtgtgtgtgtctgtggcggggacaggatctcactctgttacctaggctggaatgcaatggtgtgattgtagctcactgcaggcttgacctcccaagctgaagcgatcctcccacctcagcctcctgagtagctggaactacaggtgtgcgtcaccatgcccagctaatttttttttttttttttaagatacggattttgccctgttgcccgggctggtctcaaactcctgggctcaagcaatcctcttgcctcagcctcccaaaaggctgggattacaggtgtgagccactgccctggccctttgactacctctcgtagcacaatatttagttggtgataagagtttatcttcatgttgactttgtatactctttgcatctcaaaggacagaaatcagtctcttggtgtcactgttcctctcttgtttactgcagctggaaccagtcttctgtcgtagcactttccatgctcagtagtccccccatatccgaggtttcacttaccgcagtttcagttactggcagtcacctgtggtctgaaaatattaagataattttgtgcatgcacatgagagagagaccacattcatgtgacttttattacagtatgttggtgtaattgttctattttattatgagttattgttagtcttactgtgcctaatttataagttaaatgtgcctaatttataaaataagttatcataggtatgtctgtataggagaaaatttagtatatagggtttagtactatccgcagttttaggcatctgctgagtgtcttggactgtatacctctcagatggtagggagggttcctgtgtctctccacttaacactttctagcttgtggtgtggtattttttgatataatgctttacgtttgtgtgattcatagttatatttctaatgcctaatagtgggctagtgtcaaaaggcaaattaaaaatctaattaaaaataaagatctaattggcttttatttgtgattctagcattgaatcgtacctcattctgtaaaacaggatgggtgttccagtgaactgaggagaggagcttggctttataggcaaaaaaaaggctgaagaaagcagaaataaagaatgaacagcagattggtcatttcagaattactttccttacagggttaaaacagaggaaacttttcttattatcccagctcaggtaaactgggcctcttctgattggtggccatgaatctcttatttttgttttttgtttttaatagaaaactggcttgtttcagagcagttttttgttttgttttttttttgaaacagggtcttgctctgtcgcccagactggagtgctgtggagtgatctcagctcactcactgcagtgtcagcctcccgggctcaggtgatcctcctgcttcagccttctgagtaggtggaaccacaggagtgggcccccatgcctagctaatttttaaattatttgtagagatgaggtctccatgtgttgcccaggctggtctcaaactcctaggcttaagagataatcctacctaggcctctcaaaatgctgggattacaggcatgagccaccgtacccagctgagttcagtttaagtggtagttaccacaagtgattccattctggtttggtgtggtctactggggcctagtacaggagctcagtccgaaataatgtacccctccccacccccccgtcccccttaaactgtgttgaacagtagtaaatgcttgaatgaattgaagagtggttgatgtggtccagatcgttgcctgggttatcagattctctggcgagggactgttagcccagaggtatgggccactcatggatctttacaatgccatatcaggcatgggttcctttttctttgtattttactaggcagttattcattaaatggaagagaaagaaaatattatcttacgattcttgtatttagatctgtggtaagtaatttttgagtgaataaagtactcaaaactcagagaatttctctttatttgctctctcttagtataattaatacagttttattgaaattaaaatgcacctagctgagaatgtgatacacataggtgttcagtgaatgtcagctaacgttatttttgttttagcttacagcagtatctcttctgctacttgttttgtatttatttatgtttgtttactcttccccaccagataaactttctggggggcaaagaccttactatttgacattgtttttgcctcactttctataagaggtcaattatgtgttgaattgtatggtggggccagctaaaatgtgttcatactggctctgactttaaaaggtgcggaaccgttgtagcaatggggtatcgaagctcaggtagtcaacctgagagaccaagaaagaggagaaacacaaagattgctgtcttgttatgctagacatatgctttttgctaaaaaattcatattcgacattcttacgagatatatttctctgaatctaggagtggttacatttctatagtgtcttgcaatctcataaatagaacattatacgtgaatagttaaaaacattgatgatgtgatctcatcgatagaagtgaaaagaagaacatagaatttcagcctggtttaggaggtaaggctggaaaaataagtggggaaatagagctatatctcgagctagcttctcatttctggaaaactagaatttggaggcttacaagagatgtcagggaccaaaatagtaaatccaaatacaatcagattaggataatattgatagattaacaatgagtcatttagatacaacctgttctcaggttaagtgttttcatgtagcagaattctttatttcatattgattttggatgtcgtggataagtaagattaaagggcgtattactagggaaaattttattatcattgaccttgtaaaatgccctatagtacagaatgaggtatcatgagataaactctgtcatttctctcatcagactacagagaaatgtaacctgaatgtgaagtgagctgctgacaaggtgaatggtctgaaagtatttgaaattacctgcactcatattggctgtcataacgctgcatggtcccctcctcctcttcccctcttctttttagaaaaagactttttttttttttttttaactaggcagttatttttcctggcttgacttgtggtctgtgattattctctaaattgtgacttccagtggtttcatgatgtcatttttcttttcttttttccctgaatggtataaataatttttatttagtagtagtagtttaatacttaggcttagagacagcaggattatattttgttgctaccatattgaggtcattatttggaacctgagtgaacaaggataagtacatctgtgatgggattttagcggggagaggtccttaaagattacccagtctgttcctctagtcagtgatttgttcatttattcaaatatttgagtgtctatatgcttttctttgcagtatttcttttcccagatgttggtaataacaccttcagtacaactatctcaagccaaaaatcttagaagagtactgtccaacctagtagccactagccacatgttactatttaaatgaacattagttaaaatgaagtaaaatatggagttcctcactcacattagcacatttcaagctggatccatgtggctggaggctgccctctgggacactgtcactgtgtagaacatttccatcactgcgggacattcatttggacagcactacctcagagcactccttgactccaggggagtcagcatccccatccccatccacttaatcttccgagacctacgtctgtcagatttgttccctttaaagaatcctcccttgtcttagtttaggtcttcatcacctgtcttctgaattatggcttaaattcagtgaccagccttgtgaagctgtccctgccgttgcccctccagctgtagccaccttctcccttgtgctctgtgcatccgccatatacacctgtcagagcactggccccacggaatgctacatggttgtttacagacttttcttcttgtggactgagaggttcttgggagtccagggttgggctttggttttaccagggggaggggcaggcacagtgactgacacataactacatatatatgtgtttattgagcaggtagaggcatggatggatggaggccatagcaggttgcagtttgaaggcaagagacctttggatacctggaaactagacgacaggagggcatttgtgacacagggagtgtaacagatgcaaggccagaggtaggaagttacagggcaattctgcttctggacagtagccacaggagagcactgtcagcaccattcagagtgtagccatgtatggaaatagaattggagtgatggtgttgcatagaagcatgcttccctgttctggccagtattgcagctcgtagtagaggtgctgtgtttccacttagcagccttaacctgtgacttcaaaggagttactgatatgctctccattgtcaaatgaggctacgtattcacaaagtctagttaattcttcaagacttttatggttcttgacttatgttagaaatgttagcagctcagcagcaaagaaaaaggcatgtgtccgtgcccaaaaggagacaatccaatgtagatattacttacttactccttttttttttttttttttttggtagaggtggggttttgccgtgttgcccaagctggtctcaaactcctgggctcgtgatctgcctgctttagcctcccagagtgctgagattacaggtgtgagccacaccgtgcctggcaagaacagttgctttctagtcagactcatcctgactcttctttttcctagctgtgtgatcctaaaaaactcactttttgatcctaatttcttcatttttaaatggagatattacctgcctgtgaggactaagttaaatgtatatgacatgttagctctatgcttagacctgagtaaaacatttaccagtaatagctaataacaaaaataataagtccatagcctttcacacaaatgggaaaattcataattgtgtttcacaaaggaagagttaacacgtgattcttaaacataaatggtcatccagaaaatacataggatgttggacattttccttgtccttaggcatagttagctggatataaccatctcttaagtgaaatgtatagggctggttaccctcaaaatcatcaagtcgaatcagctgatctagtagaggtaaaattaggcctgggtaatctaaacccagggataattttctgtatttggaaataaggtgatcacttatgcagattacttaggaaaaagctcacttttctcttttactcagcatcaagagcatgcagtacagctgctctgaaggaagagaagaaaattgtgtgctgctttagttttaaataagtaaaataggatgtataaaatggagtatcgctgaatgatcattctattttttttttttgtactgttaaaaggatggttgcggtcttaactatgtgagttcttagaatctactggcctacatagaattcatgggggtccagataattctttttagtagactcaaagttgcttttcttccataatgaaatggcacagttatctgttttctcatgcctggacctcctttcccaagcttgatgcctcccacccttgtttgaccttcctgaagctgcaccccgccccacttctgggccgctgttctctcgctttcttgcgtctaccttgtattaaaattatctgcatttatttgttaccctcacaagactgagtaccttcacaaacaggcattttcttattcatttttatgtgttcagtgtttaaagaggggctgacttctacaagatgcttggtacagtcttgctgagtgaatggatgcatgttcactaaaattttcttgtatgtattcttcccaagtagaccataattctgagtaggaaaccatgtcatgcttcttgttacctcatagctctagcacattggtatacaacattgatcagtttgctctgtagcattgctgttaatgtccagtgtcctggaaacaccttctagggcgtatttggcagttattaaatctgttactattttatccctgtagctactattagaatatttataaaatgatctccaagacttttattgaatttgaatattgttatgggaaaaatcgatacaaatgctcttattagctacagttcttatgtgaatgattactattatttgattcagtctgtaggcagtaacaaaacctaaaatatatgtgttgttgagtaaatgaattgagcagttcagttgaatacacttagacttgactttttctttttctgcccttcagctattatttactgtgagtccttgaagttaatttcagaggtttttcaggatagggggttggaattatacaggatttcacacaccttattagctccttacttaaaataattaaaaaagaactagttcagggattagagctcccttgaaattgttgaaatgtgaaatttgaatttaagactttcttgaagacttgaatgcattttgcctactggtaattaattttttttcttttctttgtagttttagttttgattgctgttaactactactgataactgagccaaagtggtgatgctacttgaggggaatttctgcaacccatagtcaacgattacatggtaagagtgtgtgccttttacccttaaagccatttaatttctgtaacatagtttagaaatttaattagaaatagaaatagcataaaatattctaatatttttgaatattaaatatttaatattaatatactttaatatataaatattaacagcaggtaatattttagagctttagatcctaattaatagtttgggacattgaaagagaaaaaaaaacttgatatattcacttccatgttaatttttttgtgtgaaaaacatgattatgtagtttatgacttattaagctgagatctcagtcttcttacctctgtttttgcccatttactttttatttcctggaatttaaccaattctttgttatctgaatctttctagtaatgaatgggtatgagaagtcaagatttaaaaacttaaacctaatcagttggccggacacggtggctcatgcctgtaatcccagcattttgggaggccgaggtgggtggatcatgaggtcaggagatcgcgaccatcctggctaacacagtgaaagcccatctctactaaaaacacacaacaattagtcgggtgtggtggcatgtgcctgtaattccagctgcttgggaggctgaggcccgagaatggtgtgaacccagaaggcggagcttgcagtgagccgagatcgtgccactgcactccagcctggcgacagagtgagactccatctcaagaaaacctcaaaaaaccaaaagcaaacctagtcagttttacaataatttactctgaactgaggtggtggtgatcgtgatagtggctaaaatgaggtttttgaattatttatggatttcagtgacctgtcttactctaattttaaggggtaattgaggagcaatgagacatagcagactagtagggcaagttatttctttgagcttcactttcctcatatgcagaatactatcatctgtcttgcctgatttatgaaactgtaaaaatcaaatgagaggatgtatatggaattttccttttctttctttcttttttcttttggaaggatagggagagaataacacgtcttttggttttaagatgatattgaaagagaacataaggtagaagaaaggctattataccagaattagaagctggaagattgatctctaatcctagcttgccttgaccttgggcatatcattacatattaatttaccataggaaaattgaacttgatttccatactttcactttacaggtaatttttcaggaatgtatctgtgttctctgaccaagtttaattaagctagaaatcagtatcacatacccaagaaattccaaaatattttgaaattaatgatcacagcctgaaaatccatggttaaagaggagcttacaaggcaaaatactttgaattgaatgaaaaggaaagcgtaacgtatcaaaatatatgcgatgcacctaaagcactactttaaggggaaatttatagtgttaaatgcttatattagaaaataaaagttaaatagcttttgggcttttcctgtatgtcatgatgggttacaggctgattgtagttctgataaatggtttctttcacttcctatccaatttatatgaaaaggggagatagttaaatttttttgtcaggcaagcatttattttttaacacggatactgtctagtatttgtgttccactttatagtttttggggggctttcaggtgtgtcatctcaccacagccttttgagataaccaggcagatattactgctttcatatttagaataaggacttgaggcttatggaggtctcagctcttgaagaactcggggcttctgcttgccacgccatctgcttgttttgctgctgtgctgcatttccaggctttttgtagaagcgctgtctgtgttcagactgttgttgtaggtggcacactctgattagcttggtgaggcagattctgttggatgagggaattctctaggaggagtgctttttcttaggcatttccgttggtgtttgtattatgcccatcagaggtggcctttttttaagtaccgttttggagctatgtctatctggttgctaaatgtgtctttcctgtctcatttcttttatcatgatatttagtcctgtgtgtggctaacagtcgacttatttttacttgaccttcatgttagaatgtacatattaaataaatgttcagtgatctcctactttgtcatactcagattatctgttgccacagatttgttttttttggtttttgtttttgttttgatttttttttgagacggagtctcgctctgtcaccaggctggcaggcagtggtataatctcggctcactgcaacctctgactccctggttcaagcgattctcctgcctcagcctcccgagtagctggggttacaggcatgtgccaccatgtccagctaatttttgtatttttaatagagacagggtttcaccatgttggccaggatggtctcgatctcctgaccttgtgatccccctgcctctgcctcccgaagtgctgggattacaagtgtgagccactgtgcccagcccacagattcatttttaaactgctttattgtggaataattgacatacagtaaactatgcttatttaaaatgtataatttgataagttatttgaaatatgtatacacccatgataccatcaatgtagttgaactggtgaccgttgtttcctcatggcccttggtcatttttcccttttgtttccctcctaccctcacataacggctgctctgctttctgtccctatagataagtttatatttcctagaatgttatgtaaatggaataatacagtatgtagtattttcgtctggctttcattcagcatagagattcatctcttgttgttgcatgtatcagtagttcattccatgttatcattgaatagtacctcactgtatggatgtaatgcagtttgtttgtccattcacctgctaatggacacttggattgtttctagtttttggctgttacaaataaagctgcatgaacattcatatacaagtctttatgtgggcacatgcttttatttattttgggtaaatatctaggagtagaatggctggatcgtgtgataagtgtatgtttaactttttaagaaacttgcaaaccattttccaaagattattttgtttctcttgagcagtggatgatagttccagttcatccatgttctcataagcactctgtatgaacagtctttttaagtttagccattctcatcagtgtgcagtcatatctcctgcggttttaatttgcctctccttaatgactaatgctgttgagcatttttcatgtgcttgcttgccatctgcataacttctttagtgaagtgtctgttcaaatcttgtgcccattttaagaaattgggtactttattatagattttcaagaattctttatatattctgtatcagatctttatcagatatatgatttgtagttttattcattttaatagcattttttttcctttttaccccagaatgaaatttttgggagccaatatgggattattttttggttttattttttgcactttccccaactcccataaaagtagttactctttgtcatcttccttttcttccattttctggcagggcacttagtttgtattctctttttggggggctgtacatgagtcaatagctgtgcaggacagaagacccctaattagtgaatatgtttgcatggctgggatggtcagctctttatttctggaggttggagatctgccattccaattgtcatcagtattgactcgttgtccctggggtgtagtcaaaggcctcacctgaagtactacaaggtcagaagccagaacagggccagattcagattcaatgatgaaaatgctggcgacaattcaccaacatcccttgatttttacatgttcatttctgattgaattgtattgtgcttactgtgtgattgtaattttctgtgtgattgcagttaacttttttgtgtgacctaattcatagctttttttcttacaacttttccgtgttttcttttttaaatatgcattctcacatctatgtataacatttttaaaaactatcaattaacacttgttaattgtattattcaaatcttggtctttgttggtttctgagaaaagtatgttgggtcttctacaaaaggataataaaagttcataattgtcatttttagtgttttttttttaccaattgaatatgataagtgtcttcccctccatctgtttttgttgcgttcaccttgagtttctcttgtgtcttagagcctgactcccttttgttgttagcatttgcctggtgtatatttttaatctctttatttttatcactcctagttatttcattttagatgtattcttgaatatttatcttacaaaacccaaacaactcagtgtgttgctgctttgttcagtggaggctgtttggtgagtggtaaggacatggactgagtccaggctgcctggggttgaattcaggcactgcataaactggctgtgtggtgtctgtcaagtttacttaaatattagtgcctgtttcttccctatacaatggaaatattaatagtttctatctcattttataagaattaaatgagctaatatatgtaaaattcttgacagtgcatggcacattctataagtggtttggctgtgttcccacccaaaatctcatgttgagttgtagtccccataatccctacgtgtcaagggagagaccaggtggaggtaattgaatcatgggggcagtctcccccatgatgttcttgtgatagtgaattctcatgagatctgatgattttttaagtgtttggtagttcctcctgcattcattctccctccggctgccttgtgaagaaggtgccttgcttcccctttgccctccgccatgttggtaagtttcctgaggcctccccagccacgtgaaactgtgattcaattaaacctctttcccttctaaattacccagtcttgggagtatctttttagcagtgtgaaaacagacgaatatgaagtcttagccattaatagtgagttcacccattaacacttactgtgattatttggaaggccatagtcactattagtgcctcctttttgttaaaaaaattaatactttcttgtccattgctgactttattacaattttttcctgtaatggtttgttatttatatatccagtatcttctagttgtttgtacgaaatcaaaatattgatcatgcagataacacctgaatatatacgtcttttaaaaacttgcaacacatttgcaattaaagtaccttttgagtctcagctctgttcctcctcccttagaataataaattcattattatgaatttgagacatttccttctctgacacacactctctcgctctctctctctccccaccgtctcccccacctccgcccccccgtctctttcatacatgtaggactacatagtactttttactaaatggcatactgtaattatgaactttgtatttttcattcactgctatgttttggaggacactccatatatatatttatcttgtttcttttaacagctgcctttcccctattggtagtcatttccagtttatctctatgtcaaacagtgctgctgtgaacattcttgtacatgaattctgtgcacaagtgagaatgtttctcagaataagagatggaaatgctagggtccatagtatgcatattcctagttttattagatataattctttcaaaggacaatttgatggttggctgccatttgtatttctctggtgtaaattgccaagatcttttcattgtggttctccaaccacacatctcgtggccacagtccttcctgtcatatttttggcttgtggtttcttcctttaatctcatcccgttgcctttcaactttggaggttatctatcatttgtagtcctgtagtattgttgcacatattttaaatgtacatctttttcatcatttctgtgggtttgaaacaaaggagaagcctagtctaggtgctctgtttattatattctatttctataatcttccatttcaaattatataatttttgaaaggatttcctatgaatgagctaaggttatgcacatacatgccatacacaacctgcttataagtgtctcattttaatggagaaatatgcttagcatatgctgcagccttaaatggaaagtagattacatttaatcccaaatcaaggaaatggagattgttgttcttccttgtctgaaatgtcaccttaaactgctgttttccttagtttacccacagcagcatttctgtaagtctccttggaggctgggtatatattctagtcttatgcacacagcttcctggcagacatcaaatggaatttgacttaccagatgtcgtactgaatcatggtctgcagagatgcggatggatcacatccttggctggggaagtggggtggatacaaatatctgggtcaactcagtggttaaccaaaggttagtcatgttataaaaagtcatgtatatcaaaaatacaaaacagagtaagatagggggtctgaagcttatgcatgcaatcagcaacaaggcagtgtcaggagttgaaggaccagacaaaaccatctgtttaataagataataaaatctgatataaaaggaaccttggaaatgtaaaccacctccttcctttttggtcagagctgactcttaatgacaaatgatcaggtgcttagagggttaagaatggggagggacctgctgggatagagggaaagagaatgaatagaagcatcatattagaagtcaaggattacttgaataccaaagcagacaactttcccctccttggctgcctttttatcctggtaagacacagaaatgaagtagccttggcttactggcatatttataattgggacctgtaggaagcgtttacaatggggatgtggtgggcagagcaccagtggaagtgagagaccgagattctagtgtctactccaggatgtaggagattttgggtctctttgtcttaatctttgattgtaaaataaagttatgctagatctccaaggttccatttatcttaaaattttttttattaagtagctgattttgtctggctgatcaaaacagggaagaaaaatagttcctggtcaaagcatctcggaggttcctgggttaataatgtgcatcagaataaatttttatgcacaataaaggactataaaacagatgtaggttcaaatattaaatgtattcttgaatcccacatgttctgagtatctagttaaatgaacaccatggtctaaaaggacttagaaataaaatatgggtatattttaaaaatattttttatctaataggaatttagtgatttatttaactttaaaaagtctgaattaaatgaacataacacagagcataaagattaattgaagcatagatatgtagagcgtggcaagttgtagaacagcagcttttttcagagctccctttaccctgtccatggctagaagagaaaggcagggagaccaaaggcttgatcttcacaggctcccacaccacttctgtatccccacccatgatacgttgttcttcacttttactccgagatttcttcccacaacagagaaactgcaagacaggagctaatggtgaaaaccctggtggagagaaatcttgacctagacttcaaatccctaccttttcagttagaaccatattagcttctacctggaggatctttatatgccattttgtggcccttgaaagacaaactgtgtcccagaatgtcctctaaaaataggtacttgacaaggtttttcattacattattccatagacacaaagttgcctttttctgggagacttattatttagttgttgaggctgtatagcaaaagctaagtgacgttttaaaatggtggaatgctgcttctaagccttgagtgagagcttcactcttccatcctcaaacgtctgttgaatagcttcccgatgctgagcaggatgctggggggtctgtgatgccgtgtcatctcccattccccactgagaatggagtatttctagttgcgttttaatttccaggaatgagacatacctttaatgtagtgcttatcacactgtgttgtaactttatttatatgcctgtctctgccactaaaccattagcatcttgaggaatggggtttgttttattttcgtttgttcagtttttgcatttccactagctaaagcatcatgaaaacacactgaatgtttggagagtaggtgaatctgatatggtagtttctgaaagccagctgaatgtctaactgaaaaggaaagtatgccagagctggagggaacccaagagagcaaatctgttctgcaggagaagaaactgaggcccaccctgatgaagaaactgaggcccaccctgatgaagaaacttgcacagagtcgtgtagtgttagtggcagaacttggactagaaccccagttccccaattcctagtcctttgctgcttcactgtacctctctgtctcccatcctgtggaaacatacagaccacatttcaaagagcaaagtgtgaacatttgtcccagtgaaatgaggttgattgaattttatgtggtctttcttccttccctccccctaaatcacaacttttaataaagctttaaaaagaagcagtgtggctctagaaggcagtgtgcgaagtgaggagtttaggaagctgaggcccttcctttggcggtgggaatgttatgttagtgagtatcttttgggagttgtcagtaggcacttaactccaagcagagtgctgtaaagtggaggcaggcagacatagcccttgtccttcaaaatgagaaggccacactgaggggaaaggtcagaggaagggcttgggccagcattgtgtcactctactctatgggccctggctacttttgcttgggtcactttcattccgagggcaaaactcatacatacaagtaaaacatggttaaaaagcccaacatctgcagtatacacacatttagttttgtgtgtataatatagtctgtgccacatgttttagtgctatcatgcactgtgctctaattacctggcatgcagcaatcagagcaaaggttaccagcacatagaagagagaatcattaacactgtcaggttctgcaaactggttgttctgaaagctcaaaggtcagtctttaatggctgcatagtggagaaagaaatccactacaaaatctattcagttaattttgtatagtcaactacctctacctaccagtaatatcgttttaaaatatgtaataaagacttaatgcagttaacatgttactctacatcccatgaacccttactgcggtggagaatgaccacagttgtgggcttcagtttatttgccccattacagtgtattctatgcatgaaagctgttatccatgttaatagagtagtggtggtgttcttttctttccagaatagtctgctctctttggggtctgcacacataaattcttaagagtgtactcatatgttcactcattgagaatatcagtttacttagctggacgtggtggtgggtgcttgtaatcccagctactcgggaaactgaggaagaagaatcacttgaacccgggagatggaggttgcagtgagccaagatcgcaccagtgcactgcagcttgggagacaaagcgagactccgtctcaaaaaaaaaaaaatctgtttactgtttctttctttttttgtgaaaatagttatcagctcaatgtcttaacaaaagaagaagctgatatgttacccttgttcttactgtgaaggtggagtttctcttccaattaggatataagagaacattgcttctattttaagaaacaaaaaaggccagattatctagaaagcaataacttttcttaaatcccaaagggtgacaaacccatctgagagtagacaggacacttgaactgtttcacatttagcagagcacagggggaacaggtaaccatcatagaagtgcataagaagaattcagcaaaaattgtaatgcattcttaaggttgagtatgggctaatgcatcagtttaggataaccaggtaccccagatacaaggggaaggttacacttactcataagctgttttctacagccctccactgggtactcttaagaaagcttatgagcaagcctggagactagacagaacctcttttgatcgtgctgctctgcgggaggtaatctcagctgccactgggagacaggcatgatgtaacacctgcttccccacagccttctctcctatgacagagttcccaggagggcaatgaaacctctagcccataggactcagcaaagatctatttctggcagaggtttaggaaaccctctttcctgccctgtgaccagcaagatcctctgcttctgggacgaagggtaattaatagcaaaagcaggacagactcttaggctcataatctttcactgatgcaaagcaaagttctctttctgctgcatgagggacaggaactctttcatgcccaagacagggacaaatatcaggcagagtttagttgtgttggagaagagatgcacagatcctgagaaggccccactctgaggtccaggtatatggatcattcctaaaatttaggctgggccagggagagcaaggagcctagcacctggtaacgtagcaataacagtcatctctggagagcaagaatgtaaagaggaatttgtgtcacctttgtgacataaatgtcaaggaactacaggatgatcaggaacactgaaaaaagtctagcacactaggcacaagacagcagcccatggctaggggattttgatgcttggtgtatcagataacaatagcagccatctccctcaaaccctgactaggttgactcaatcaaccttagtaatggcttgctagaagaacatgtgaattcattgctggacaagaaatactgtttacttagtctctactgctttgcaaatgatatccagcattcagcacaaaattatgagacaaaaaaggcaagaaagaatgacgtgttgtaaatcaagagataaagcaatcagcaatcaatggaaacagactcagagataacttagatatgggaacttaaaaataactgtgattaatgtattgaaaaatgtattgagaaaagtctatatcaacagaaataaggaaacaagtttttaagagttaaatggaaactgttggaaatgtaaaaacaaattgggtttattagcaaactggatgtagctgagaaaataatgaaagctaaatcagcagaatataaaaaggaacagtgaaacaaaagaagaaacaaggaaagaggaaagtggagtggggaaggggagggatgacaaaaccgagcatctaagaactatggaacagtatcagtagtctaacacacatgtaattggaaacccagaaggaaaagagaagatactgtccagaaaaaaatactagaaggcacagttgctgagaattatcccaaattaatgaaagacaggaaacaactaataagacaaacagatccaagaatctcagagaaccccaagcaggatttttttttttaagaaccctccaagttctagaaacactggaatcaagttgctgaaatacccaaggtaaaggggaaagtcttgcaggcagccatagtttaaagaaaatgaaacattacaaacagaggaacaagggtaagaataacagcagacttcttgtcagagactatgaaagtcattaagacagtgaaataacatttttaaagtatcaagagaaaaagctcaaatcctgtcgatgcataattctatacccagcaaaaatatatttttaaattaaaggccaaataaagaatgtttcagacaaacaaaagctgagggaatttattgccacagatctgcactgtaagaaatgaaaggaagttcttgggcagaaggggcatcagatggcggttgggatctaaacaaagaaatgaagagaccctgaaatggtaaaagagaataaatatgttatattttttcttatttttaattacattaattgataattgtccagagcaaaaacaatagtaatgtggggtttataagaggtaaaatatatgacaacattggacaaagcatggaagaagaaaatggaaatatactgtttatattagggggtctccagagaaatagaacatataggatatatagatttatgaggagatttattatggaatttggctcacacaattatggaggctgagaagtcccacaatctgctgtctacaaactggggacccaggaaagccagtggtgtaattcattgtgcctagctgatggtataactcccagtccattgccaaagactcgaggacctgggattgggaaggtggtgcaggtgtaagctttggagtctgaaagcctgagaaccaggagctccaatgtctgagggcaggagaagatggatgtcccaacttaagaagagagagagagagagaaaattcatccttcctccactcttttgttctgttcaggttctcagtggattggatgatgcccacccaccttggtgagggtggatctttttttactcagtccactgattctagtgctgatgtctttcagaagcaccctctcacagactcacccagagataatgtttcagcagctctgggtatctcctagcccagtcagcttgacacataaaatgaaccattacattattctaaagttacagtgttctcacactatgcatgaagttgttcagtattattcgaaggtaggtgtgataagctaaaaatgtatatatctatagtaagctctagagcaactactatgaaaaacgtaaaaagaataaaaaccagttgtggagatgaaatgacatcataacaaataactgaaagaaagcagaaaaagagcttttggaccaaagaacaggtgggacaaatagaaaaccactagcaggatgtgttaaagaaaaaattatttaataagacttgttaaagcatggtaaagacttttattcaggaccattgcagaaggtagaggagccactgcaacagcatcttgcagtaggggagagagattgggttcaactctgaatacagcatgggcaagtggggacttatagccaaggatcagtgagagggtcagtggatggaaaagtactaagaggaggacgtcaggggttaggagaattctggctgacgcctaagaggattcttgctgaagatagccagggtgatgcgatgtcatctgggggatggtggacagttaggaacctgatgagatattgaggataaacaaattttgaggatggcaaggaatgttcttgctaaacacatttagcaggggtctttgctagaaactgaattttacaaagaaggtgcacagatgggcctagcagaaggttcagaagcctgactgaagtttggccaagcaaagaatctttgtcagatggaaggtttaaattcagccacatcaacaattacattgaatgtaaatgatctaaacaccctagttaaaagtcagagattgtaaaattggataaaaaagcaacacaaccgtatgctctccaaaataaattctctttaaatacatagaaacagaaaggttaaaattagaaggaaaaacttgtaaacactaatcaaaataaggaatgaccgttatatcaaagtagactttggaacaaagattattattaggggtaaatgggacattacataatgataatgggatcatttccccaagaagacttaataatcttaaatatgtggctacattcaacaacagatctttaaaatacagaaacaaaaactgatagaactcaggggagaagttgacaaatacacaattattgttgacgtcttcaacaactcctctctgaggacagtaggaagtaaaattcgctacccagtttgctgtaaacacatataaatgctgaatagagtataaccaagaaagtagaaagtagaaagcacattgatatgattttgaaattctttaatcatttggctttaattggaagagtaccaattggagaagttcagtgccagtattcaggcatttaattgtacaacatgtaaaattagaggagaaatttaggtttagattaattgcatgagaaataaaattagaggacaaatgttagtatcttattttggtaatataaaattaattaaaattatattactatcaacatcttatactatacttttttttttattttcatgtgagcctctcaacaacctgtaaggcaggcagggaaggtgtaactagtattactgcacagggactcatggagttattttgatagggtaatatataaaatcagaggtggggtgtacatttattgctgtgcatgcaacattgtctaccccatttcctgtaactaatatcctcaatatctatctggttctttgttttggtttttcacctatacctagtcaaagtttatatgtgtcactgtttattcattcagaatacatttgaggatacattggggtgggctggggggacgtgaaatgtggtaggtgttgtagtaatgaagggacaattaaaacgaaggctaagaattcttaagagaatcctcgcaaatggcagtaggaagtaaaattagctacccaagttgctataaacacatacaaatgttggatagagtataaccaagtatgtgtgtatgcacttatatatgtatatatttatatttaaaatagatatacctaatgctagatgacgagttagtgggtgcagcacaccagcatggaacatgtatacatatgtaactaacctgcacaatgtgcacatgtaccctaaaacttaaagtataataataaagaaaaaaaaaccctaaaaataaaataaaataaaatatatatgtattttaaaacattgccatgcttgaacgaatcagcaatcttccctaggtgttaggagctgagagagttggagggaagatgcttagagctagaggccagggtttaatgctgcccgtacatggaaatgtgtttcaggccaacctgatggaatgagctagaactgagacctcagaataaatgctgggatgttcaaagggctgtcaaatcccgtaaaagttgggtagaaaacctgcgctcgccaatcctgagaaatagcttgccatctgcctggggctccaaatagtaagaaaacaaaacaaacaaatgtgttagggagaaattagaaccacagtcttggccaggggcacagcaaaagaaaacataaaattgttctacaaggaaacttttctaaaacaaggtgcagagaacaaccccctacccccaccatgagaaagagtttgcagtaagaggttagacacactagcaagtgtcagcaggtgctgcacatgtgtgagggcacatgcacacagagaattagcacagcaagtatgaattaaggtaggtaattaagctacctggctcctcccaggaggagatgccaaggtaggattacaagttcaaggatcctgaatggatcacctgggttccttcctgcctcctttgcatgaacacagtcttacctcttcctgctggctggagtcagtttcctctgccagtacggagattcctcttttcattttctattccatggtaacatgagtccaaagtaccgtggtggcatccagaacttgcagttcagtgggatctttgccttgttcctgctaagtgtgtgccccatttcagacccccagccctgcagtgtccactggtgcagaatgggaagcacaaagttcccctgggctgttggtggtgatcattaagtagggcttttcttgcctccagccctaggcgcctaagcccacatgtcctcctccttgggatcccactgccatctagaggcctctgatgtataagtgtactgtgttgtggagtatgaccatcctttcagagtgtctggcaagcttgtgcttcagtgtgccttgaaaaggctggcccagcgttcattgggatggacccgcgttgggtggtttgatatgtgatgtgaccattggatcctgtcgatgggcccacgctcgacgtccttcactgtaaagtgggtcccctcgtcagatgcgatgatgtgtggggtccatcaggctgataattctgggtggacttatcgatgatgcaggctggcggattttgcctgctttgtgttcagtgtctctttggtgggaaactttccagtggaggttaacaagtgatacagaaatcttcaccctgtgcccactcccgaatttctacccacatggcctttatccagatctccttgttcctcatcttccagttctttttatttcagtaccttgaccatacaaccaggctgttggccactgcccacacatctgcacgcatttcagatcaagctacgcggtgtcatgaactggtgtcctgcccacagctccacctgctgggaagattttcctttccactgtctctgagggccatcctgagtactgctgcagcacacacagtccatttttgactaacaccatgtgctgagctgatccgtctgaaaaaccaagctcaggctttccttcctccttcccctggatgtatgagtctgctgcctgtgtaacctaggcacacaggggaggggcactacagctcttgggggtgacttggaggtctgggcttcctgctcatgggactcacttgtatcctgtggttctactgtggttcaatcttgaatgtcccatttctattttatggtcaactgctgctagtttgaattaataacttgactgacagaacttagctcattctggggagctttgcatgcctggacccctggttctctgtgatctctaccaggtcttggtaatatagtacatttaatactctgatgtgatggcaggtcctagggccttgcctttgattctcctgctggagcttgccacaaactccatattgtcctgttttccttattttttaaatttttcttttatttttatttatttattttttgagtctcagggcatttattttgtaaggaacatgtttgaaaaggggcattttaattatcctgtaaatgtttttacctcagcaataatgtttacatagctagtaatcatggctctcaggcatgatgagttttactgttgttaagttttgttttgtttttatacttaaagttctagggtacatgtgcacaacatgcaggtttgttacataggtatacatgtgccatgttggtttgctgcactcactaactcgtcatttacattaggtatttctcctaatgctgtccttcccccagccccccaacccccaacaggccctggtgtgtgatgttccctgccctgtgtccaagtgttctcattgttcaattcccacctatgagtgagaacatgcagtgtttggttttctgtccttgtgatagtttgctgagaaggatggtttctggcttcatccatattcctgcaaaggacatgaactcatccttttttgtggctgcacagtattccatggtttatatatgtcacattttcttaatccagtctatcattgatggacatttgggttggttccaagtctttgctattgtgaatagtgccgcagtaaacatacgtgtacatgtgtctttatagtagcatgatttacaatcctttgggtatatacccagtaatgggatcgctgggtcaaatgctatttctagttctagatccttgaggaatcaccacactgtcttccataatggttgaactaatttacactcccaccaacagtgtaaaagcattgctatttctccacatcctctccagcatatgttgtttcctgactttttaatgattgccattctaactggtgtgagatggtatctcattgtggttttgatttgcatttctctgatggccagtgatgatgagcattttttcatgtgtctgttggctgcataaatgtcttcttttgagaagtgtctgttcatatcctttgcctactttttgatgggttgtttttttcttgtaaatttgtttggttcattgtagattctggatattagccctttgtcagatgagtagattgcaaaaattttctcccattctgtaggttgcctcttcactctgatggtagtttcttttgccatgcagaagctctttagtttaattagatcccatttgtttattctggcttttgtttccattgcttttgatattactgcacagggactcatggagtcctgaagtccttgcccatgcctatgtcctgaatggtattgcctaggttttcttctagagtttttatggttttaggtctaacatttaaatctttaatctgtcttgagttaatttttgtataaggtataaggaagggatccagttttagctttctacatatggctagccagttttcccagcaccatttattaaatagggaatcctttctccatttcttgtttttgtcaggtttgtcaaagatcagatggttgtagatgtgtggtgttatttctgaggcctctgttcggttccattggtctatatctctgttttggtaccagtaccatgctgttttggttactgtaggcttgtagtatagtttgaagtcaggtagcgtgatgcctccagctttgttctttttgcttaggattgtcttggcaatgtgggctcttttttcgttccatatgaactttaaagtagttttttccaattctgtgaagaaagtcattggtagcttgatggggatggcattgaatctataaattaccttgggcagtatggccattttcacaatattgattcttcctatccatgagcatggaatgtttttccatttgtttgtgtcctctttcattttgttgagcagtggtttgtagttctccttgaagacgtccttcacgtcccttgtaagttggattcctaggtattttattctctttgtagcaattgtgaatgggagttcactcatgatttggctctttgtttgtctgttattggtgtataggaatgcttgtaatttttgcacgttgattttgtatcctgagactttgctgaagtagcttatcagcttaaggagattttgggctgagacgatggggttttctaaatatacaatcatgtcatctgcaaacagggacaatttgacttcctcttttcctaattaaatacctttatttgtttctcttgcctgattgccctggccagaacttcgaatactatgttgaataagcatggtgagagagggcatccttgtcttgtgccggttttcagagggaatgcttccagtttttgcccattcagtatgatattggctgtgggtttgtcataaatagctcttattattttgaggtacgtttcatcaatacctagtttattgagagtttttagcacaaaggactgttgaattttgtcaaaggcctttcctgcatctattgaggtaatcatgtggtttttgtcgttggttctgtgtatgtgatggattacgtttattgatttgcatatgttgaaccagccttgcatcccaggcatgaagctgacttgatcatggtggataagctttttgatgtgctgctggatttggtttgccagtattttattaaggattttcacattgaagttcatcagggatattgatctaaaattctctttgtttattgtgtctctgccaggctttggtatcacgatgatgctggccccataaaatgagttagggaagattccctctttttctgtcgattggaatcgtttcagaaggaatggtaccagctcctctttgtacctctggtagaattaggctgtgaatctgtctggtcctggactttttttggtgggtaggctattaattattgcctgaatttcagagcctgttattggtctagtcagagattcaacttcttcctggtttagtcttgggagggtgtatgtgtccaggaatttatccatttcttctagattttctagtttatttccatagaggtgtttatagtattctccgatggtagtttgtattcctgtgggattggtggtgataccccctttatcattttttattgtgtctatttgattcttttctcttttcttctttattagtcttgctagtggtctatcaattttgttgatcttttcagaaaaccagctcctggattcattgattttttgaaggatttcttgtgtctttatctccttcagttctgttttgatcttagttatttcttttttttttttttttcttgaggcagagttttgctcttgttgcccaggctggagtgcaatggcgtcatctcagctcatcacaacctctgcctcccgggttcaagcaattctcctgcctcagcctcccgagtagctgggattacaggcatgtgccaccacgtccggctaattttttgtatttttagtagaggtggggtttctccatgttggtcaggctgttctcaaactcctgacctcaggtgatctgcccacctcggcctcccaaagtgctgggattaaaggcttgagccaccacagccggccgatcttagttatttcttgccttctgctagcatttgaatttgttgcttcttgcttctctagttcttttaattgtgatgttagggtgtcgattttagatctttcctgctttctcttgtgggcatttagtgctataaatttccctctacacactgctttaagtgtgtcccagagattctggtatttgtgtctttgttctcattggtttcaaagaacatctttatttctgccttcatttcgttatgtacccagtagtcattcaggagcaggttgttcagtttccacacagttgtgcggttttgaatgagtttcttaatcctgagttctaatttgattgcactgtgttctgagagacagtttcttgtgatttctgttcttttacatttgctgaggagtgctttacttccaattatgtggtcacttttagaataagtgtgatgtggtgctgagaagaatgtatattctgttgatttggggtggagagttctgtagatgtctattaggtccacttggtgcagagctgagttgaagtcctggatatccttgttaaccttctgtctcgatctgtctaatattgacagtggggtgttaaagtctcccattattattgtgtgggagtctaagtctccttgtaggtctctaaagacttgctttatgaatctgggtgcatctgtattgggtgcatatatatttagaatagttagctcttcttgttgaagtgatccctttaccattatgtaatggccttctttgtctcttttgatctttgttggtttaaagtctgttttatcagagactaggattgcaacccctgttttctttgctttccatttgcttggtagatcttcctccatccctttattttgagcctgtgtgtgtctctgcacgtgagatgggtctcctgaatacagcacactgatgggtcttgactttttatccagtttgccagtctgtgtcttttaattggggcatttagcccatttacatttaaggctaatgttgttatgtgacaatttgatcctgtcattatgatgttagctggttattttgactgttaattgatccagtttattcatagcatcgatggtctttacaatttggcatgtttttgcagtggctggtaccggttgttcctttccatgtttagcgcttctttcaggagctcttgtaaggcaggcctggtggtgacaaaatctctcagcatttgcttgtctgtgaaggattttatttctccttcacttatgaagcttagtttggctggatatgaaattctgggttgaaaattcttttctttaagaaggttgaatattggcccccattctcttctggcttgtaaggtttctgtccagagatccactgttagtctgatggggttccctttgtgggtaacccgacctttctctctggctgcctttaacattttttccttcatttcagccttggtgaatctgacaattatgtgtcttggggttgcttttctcgaggagtatctttgtggtgttctctgtatttcctgaatttgaatgttggtctgccttgctaggttggggaagttctcctggataatatcctgaaaagtgttttccaacttgattccattctccctgttactttcaggtacaccagtcaaacgtagatttggtcttttcacatagtcccgtatttcttggaggctttgtttgtttctttttactttttttctctaaacttgtcttctcactttatttcattattttgatcttcaatcactgatatcttttctttcacttgattgaatcagctattgaagcttgtgcatgcgtcatgaagttcttgtgccatggttttcagctccatcaggtcatttaagttcttctatacattgtttattctagttagccattcgtctaaccttttttcaaggtttttagcttccttgcaatgggttagaacatgctcctttagctcggagaagtttgttattactgaccttctgaagcctgcttctgtcaactcgtcaaagtcattctccgtccagctttgttccattgctggcaaggagctgtgatcctttggaggagaaaacgtgctctggtttttagaattttcagcttttctgctctgctttctccccatctttgtggttttatctacctttggtctttgatgttggtgacctacagatggggttttcatgtggatgtcttttttgttgatgttgatgctattcctttctgtttgttagttttccttttaacagtcaggtccctcagctgcaggtctgttggagtttgctggcactccactccagaccgtgtttgcctaggtatcaccagcggaagctgcagaatagcaaacattgcagaacagcaagtattgctgcctgatgcgtcctctgaaagctttatcccagaggggcatccgcctgtatgaggtgtctatcagccccttctgggaggtgtctcccagttaggctacatgggggtcagggacccacttgaggaggcagtctgtccgttctcagagctcaaacgccatgctgggagaaccactgctctcttcagagctgttagacagggacttttaagtctgcagaagtttctgctgccttttgttcagctatgccctgcccacagaggtggagtctatagaggcagtaggccttgctgagctgtggtgggctccgcccagttcaagcttcccggctgctttgtttacctactcaagcctcagcaatggcggatgcccctccccctgtcaggctgcttcctcacaggttgatctcagactgctgcactagtagtgagcaaggctccgcaggtgtggtacccaccgagccaggcacgggagagaatctcctggtctgctggttgctaagactgtgggaaaagcacagtatttgggcggaagtgccctgtttttccaggtagtctgtcatggcttcccttgacgaggaaagggaaatcccctgaccccttgtgtttcctgggtgaggcaatgccccgccctgctttggctcgccctccatgggctgcacccactgtccaaccagtcccaatgagaggaaccaggtacctcagttggaaatgcagaaatcacccatcttctgcgtcgatcatgctgggagctgcactgcagaccagagctgttcctattcggccatcttggaacagaacttatttttattttttaccaccaatatctctgctgggtcatacagccttagcagccaggctgtttgcaccacagcctagacctgctgaagggtcctttcttgccttgagccccactcaaaactggcagctgccgtgtcatgcagtctgtagaccagagccatatcacaggtgtgttgcccccagaacccaacctaatcagcactgggcttcctcagcattgggggatgcaagatataacaaattgtcttttccttaggaggagatacccagcatgcctctgagcactgggtccctcagaacttcaccgcagttgccagaccctgaatcttcacagggcttatctgccaccctctggagcatgtgtgtcttaccaagggctcctgtgtgctggccaccctgtgcttagtctgtccagtcagcatgacggtgttgctctctttcctctcttaggcccagcactttcacagctaggttgttgctggaattcgtattttgttatcaacttagcatccagaaagaagagttgcatgtaatgcctgcagggggagggtacctgctgccctgtaggggagaggcctctgcagcatattccagctcagccaagtgcaagcccagagagtcccaattgagggacttgcaggtaggttgtttagactcaacaatatcataggcattcatctagaattccccatcccagttttcagaatgctgggttttctctcttagggcccagacctgcatacttcacttgccttggctgagatttaaacatttccagctcttactctcacaactggaccttggaaatgggaaacccacagcttttcattctgtctgcccatccaattcagatggtggcgaagactgctttgtacccactaggaaggccctgttgccctcacatttagctgttaactgcttgttaactgcagttcagtatcccgttatccttatgcagggcattagtacaattttagcactgactagccaactccgctgcttttctggaatttttccactgaatctgcattattgccttggacatgaaaggtatcccttcatttggacattttccaggtcaccgtcactgtaatctttagcaatcgagccatgacctgtgccagggactaccctcctatcaggatggcatcctcaactgcagagtggtctgtgagcatgtcccagatcccccatctcaccacctgctttctcagatcattctcagggcacttgggtttgtctgggtctgagcaacagacaccaaggtgggatcacagctataggatttgattaaggatatcacctatgtgaaagaaaagggggtagaaactggggaggctgagagagccatcaaaccacagtgcaaacctgacccttgcagtggggaggagagggggttgggtgttagcgagctttcctagtctgccatgaggtctaagggagattcagcagagccgatgaggggttcttgtctttaattcacctttgtcagcttttctcggttatttcatcctgatttcttgctgcagactagttttgtcattctccatttcatgtggtgggagttatccatttccatagttgaagacagcagccagaccaagctggatagcatagtcccacctccaaattcttagggaaggaccctggcccagtttcagccatgtctgggatctagttcacagttaggtgaaccaggttttatctctctaaactgagacatttcccagaaaagctggacaaactacagacctaacactaatactttatataacctctaatagtcctaaacattttattagcaatcattgttttattcttcacagacagactgactttgaagaatgatttggatgggtcatagttcttccaataaaggaatcaagaggcgtacttaagtattctgttggtgactaactggatcagttcattaaatgtttgtttttgtaattgcaaagtattttcaagggtaatcactgacccagcattttttcctttgactcttcctcgctcttcaatttattcaaaactgagttagtgttagagacgataaaagctgtctgggagaagaatacatttgttagagtacgctatggtttggatgcagtttgtctccatcaaaactgatactgaaatttgatcccccagatgttgggaggtatggcctagtgggatctcttatgaatagattagtgctttccctatgtggtaagttctcactcttgtgggaatggattacttcctgtgagggtgggtggttaaaaagagtctggcttccttggtttctgttgtttcttctctcaccatgtgatctctttgcatacacccactgtcctcctattttccaccatgagtggaagcagcctgaggcccttaccaggtgcaggtgcccagaatcataagccaaataaacctcttctctttataaactacccagtctcaggtactctgtatagcaccactaaactaagacaagtaattgacactgaatttgaaaaccataaaaatcattactacattattagaactttaaagaagagctgcaaagccgtcttttctgaagttgtagacaggtagcatggcctctctctcttgtcttttgtatttatacaggcataggagttccaaatagaggtttaatgaacatgagaaatgaaggctggggattaattagtcaaagctgaaatactgcaacaacaatatatgaagtaccccaagggaaggccaaagagaaatatatatgtaaatgtctatggctgtacaatcagcaaacattttttgaataatcaggttgtgtcgagggctgttcagggcattgtggggaacacagaattcatggactcagtcccaaattcaggcagctcatagttcatctgggaagaagacaactgtgagtcctgcctctgccaggcacagagacccctacagtttgcttgggatggttaatggggaaatgaatgaagtgccgacatgttgtcccttccaaatccctctcagagctccctgttgctctaaaatagagtgtatttatagaaaatgtgaggtatagtgaggtcaacagattaggagacaattgccatagaaaagatagcttgttacagttcccaagaggagggggtcacagcacaccacgcagggccacataggaagcacagggtccttgaggaggcagagcgggacggggagctgtgggccggagtcttttttgtggtttctgtgggaaggagtggacaaaggggaagcagagtcaggattggcgggtttgaataatttcagtgggctctcagcttgggggctgtttctacttgtctagtagtttggccatggggtgatgtgcaggtgggtagtggctaggagtgtgagagccacatcgaggaggtgataggtgtgataggtgtgtgggctctggattggttggtttgcattttgaagagggccctcttgggtgagctgttttccatctattggaattagtaaccttgggaggatggcaccaagctgtccacccccatgatccaaaagtttcccactgggccccactttcaatacctgagatcacatttcaacatgagatttggagagaacaaacatccaaactatatccctaatcttgtcaaaatgaaaatatattccagtcattggattttctagtattgtatgaagatgaggctggttgtatgattaggaggtttgaaactctataaactccttaagtaggaagttaagattttatttatcatctctttttttttctttttttttttttaagacagtctcactctgtcacccaggctggagtgcagtgccacgattttggctcactgcaatctctgcctcctgggttcaagggattctcctgcctcctcctcctgagtagctgggattacaggcatgtgccaccacgcctggctaaatttttttttgtattttttgtcgagatggggtttcaccatgttagtcaggctggtttcgaactcctgacctcaagtgatccacccaccttggccttccaaagtgctgggattataggcttgagccactgagcccagcatatcatctcctttttgaggagaggggtgaaagggatgcctaggatgttggagaaggcttttctgaagtgtttggtgatccttgactcttatttaagtctgaggcactaaaagctggtgcactctgggtgcttggggagattttgacaggtgttactgcctgggtggcagtttcagcaggggaaagcctccctccccagtgttcatatttgtagatcttttctcttcaaacattccccaggaaggaatgctccagtgtttttggatgggagtaaaagccaggctgcctgtgttctaggagccaagtggaacaagaggttggggagctgtctcaccagtcattgtagactttgatttagtattcctgtttccagtacatttcctcccctacctttagctatgcctagagtcccaagttcaaattctttaatttacctttcttttccagagagtaaaacatcctgggttgggtggaggaagacagcccaggaagggagaaggcattcttaaaaggagttttaaaagccaccccacctgttttatctcccctcaattcccgtttcgcacttacctggtgcctcctactcctgagccttttgtagggagggagaaggttctgtggctcaggtgggcttacttgcttgggttggtaaatggggacattgacctgctgcccccagttagcagcctaggtgtaccaaaatgccagaggtttgtctaggtccagttgcgtgccacacagaaagccaatcactgagacaatgagtgttgctagggaagaaagctttgattgggtgctatagctcaggagatggagataagcctcaaatccatcctcctgacctactaaaattaggggtttatgtagcaggaagaaaggtaactatatgtgagaaaacaggaattagggagagataaggaagaggagttggtcaacagggaacaggtggtcttaagcagtcatgatgggtgaggagtctgacttctcatggtccagatgagatgatctagtaagttttagttttttaatactacctggaaggccggatggatggttgcctgagaaagcaattcagataagacaaatgtaacttgctcaggcttcaagactcggagggtcaatttctacgtttattcaaagaaaccataaacaccagttctgtgggacaactggggtgatgtcataatggtggcctttcctgtctcttaatctggttaagtggtcttcaggtttgtggcttgtgtctcctctcttgctcttgatacatgtggactttttgcctttcctctctctcctcatttcagtgaagagagaagtcagaaatatggaatatattatttttctatgaagtgagattatactatacatgtaccttcaggctctataaaactcactaaagtaattcactgtttgttgcattttagctgattctgtcacatagaaattttaggataatgaaaattcctggaaaatagtcaattttcaagggaattaaaattccagatttgttaaaatgtgaatatgagcttataaagaatgtgttttcaattttcagattgtgaaccatgcctttagtgaagaggaacattgagccccggcacttgtgccggggagctctgcctgaagggattaccagcgaacttgaatgtgtaaccaatagtactcttgccgctatcatacgccagctgagcagtctgagtaagccatcttttttctgattaccaatgacattaactttttgttagcaaattgattttaatagttaaatgattgtccaaagaagagattgcagctttaaggaaaagatcctttctccttctgtatttcccagtatgaaattgaccactgcacctgtactgggcttgtgatgcttaactttaggcaatgaagatgtgatgctcttaccaactcacaaattattagatgagatcaaatgtacagatttaaaatagtgttaatttttaaaagcttttgaaaatgaagataattggtaattttttaaactatcaattattatgaattattttgttaaacttgaataggaccaattgttttgttttttaagtgtaatagattgaaaactagttaacacctgtaatatgcctggcacatagtacctacttaataaatatctgttgattgaataacatcccaaatgaaccatagtataaagccaaacaatagatttgctgattttaacctactaaaagttaaaatgcagatactgatttctgcattgaggtgaacagatcagctggttattttatgtatatggtaccacgtatatattggcatgcatagatgtatggcaaatgcaagctaggaagaaaaggctgcttcttattctcattttgaatattaatattaaatatctgaagaatattttataagactcaaatatgcatgaaaatgctttttccttcaaagctttttgaagttgcactattttcccccaaacttttacatttattttctgatcttgttttctcacttcatcctgctccttttcagtttaggtggtttatgtggcatttttggtgacaggttttcacagttaaatttttcagaaactctgttaataactagaaaatcttccatgaaatgtcccatattggtagcctcaagcgaagggcaaatttttttttaactcaactacttttatttatcttgaagaaacgctgcaggtaagtattggtttctttaatagagttgtactgtattgttacggatatatttttaataatatctataatcattagctaaggcaaaagtatgtaaagaaattacataaaatgttttttaaaataaaattttcctggaatctaagctcttatgattgacttttggtagtggtaattgataaaaatatacaaattcacataattacatgaagactgcttgtaaattattgaagggtaaaattgtttttgcgtgtatttatttttgtaggaatgcttttagtctcttgtttttatggctgaaatgcctgttggcacaaagtgtaagtgatgaaagccgacataaactgtcagagttttaataatcaatctgtatctcatgctgtaataatcggcggagtgttgtgttagttgtgtttatggtgtttgcttggccacagtctcctgtaagtgaatctgcccacacagtatgccttgttctacatggcccttgtggtaaatagaatagtaatagcccctccggatatgtccatgtccttatccttggaacctgtggatgtgttatgttacgtgtaagagggaattaggattgctagtcagcttactttaagagaaggagattaccctggtttatctggtttggttcagtgtaatccacaagggttctttaaatgggaaaggagggaggtagaagaatcagtgccagggtgacgtgatgtgggaaggacccaactgccattgctggctttgaagatggaagaagaggggccatgagccaaggaatgcaggcagactggagaagctggagaaggcaaggaaattggttctctcctgaagtccccagaaagaacacagatctgcccgtacattagttttagcccagtgaaattcgtttctgacttctgacatccagaactgtaggatagtaattggtgttattttaagctgttatgtttgtggtaatttgatacaacagcaataggaaaccactctagctttggttgtgttttgtaccacccaatccactgtagcctcatgattgggccggggctgggaacctgcctagtggatagtcagttctgagttacgctactgcagtgcatctcaacctggcttctctatcagagtcacttggtgagctttaaaacaggatgctaggaatcacccgagagattgtgcttccggtaagcaccagagatgacccacaaaattagacacccatgtgtctggatggaaaagatgagctgggtgagtcagatcctttcaggaagttcgaactaagaaatgcagtgaatttgctagtctcttatgagacctactgctaaaatgtcatctgggggtgaaaaagccgtaatgaccaccggttaggcagagttgtggagggggctgaacccgggaggaagcagaaggaagccagttgatgaggaaaggcaaaagaaggatgtacaaagagaagcaagaacatgagcgagaccgcaaggcccacaaggtggaggcagcagctgcttcttgacctgcccaggatggctttcccctcccatttgtggtgcagggcttgggtgtcctcacagtgacccttcctcacttcaggttcgttgagtgcatctggggcttacaacccaaagagcattacagaaagagaagcacagtgatatatactgccaaggatataattttggaaaacgaagataactgagtgcaatgaactgaatgtttgtgtctcccaacaattccgcgttgaaatcctaatcctcattgtaatggtctttagagctaggattttggggaagtaagaggtcatgaggtggagtcctcatcaataagattagtgcccttattaaaaaggcctgagagagacaccttgccccttctgcctagtgatgccaaagcaatgaggcactgtcttgaagaagagagagcaaccctcactagacaccaaatctgctggcaccttgactttggaattcccagcctccagaactgtgagaaataaatttctattgtttataagccacctactctgtggtcttctgtcatagtagctcaaattgcctgtgacactgaattactgattggtgatagaatatcaaagtagattatctgtagtttattagtgtttattcattcattcttctttgtatttcatagaattatatctcgtatcaggtacatgattgtgattatcagcagcctaaagtagtagtcttccttaaaagatgccgttttatgggagtagacattctctgttttaatctactattcttttacacacgttgtctggcaaaataaataaaaatataaatataaatgtgagacaggtggaaaaggaaaaatatgtgacctgtaatcaagagaaacagaagtcagtcagtagaagcaagacccacagatgaccccaattttggaaataactgatgagtactttagaatagttatgaaaaatttattgaggggtcatccagtttctggtctggcttttaaagagtttggaagtcactcctgtctacacaataagaggaagttcaataatctgaaaaccagccttttgaaagatccatgtaagaactgaagttacaggacaaactgatgcccccaaatttggaaagtaagtacaggggacagcaaataactttgaattgggttctgcttagaagttaaccacatttataattttaaaaataattgataagtcacatcaacatgattataaagtaggaaacagatatgcagttattacaacctgctacaagacaacactagcacatagtaaatgatgtcaatgttttgcatgaatcttcagttgttcgtggtttgccactggatattaatatattacaggggatgaggaaagttatatgcaaatatatatgagctaaagttgttaggaagaataagagaatgtaaaggaatgtttttatgttatttttaaattttgtaatcattcatcaggtatttaaaaattttaggaatgtatgagcctatagtattaaaagtcttcttttacagagtgttcattcctgtgacaaagtcaaaacataatctgtttttaaattcctttgggtacttacccggccattattcagtgggtccaaatgagaatggatcatcttaatcctccccacttcactgctcaccccccacacctgtgtcactcccctcccacccttacctccactccccacagcagaaaatcattttcaggtacagattgggatagatgatgtttaattatctgcttcctgtaagtgatacagagggggactagactttctctacatatgtatcttaggggaaacaccagtgcaacttagggatttgccttgagcctgccctggtcatccctgcttgagcagcaggaacttgccctgggagacctactgtgaaaacccagggcaactaattgttctagggaaggaaaaacagaccaggactccacagggagtttctttggtcttttctaaataggaagagagttacctgatcattctgattcttgtcacacttatggagacagttcagggtcatgaggatttaaatgactttgcataaagcaagaaaagaatctggtcttagatagcaaatggaattctgaaggccctacaactttacataacttttaggaaatctgtaggtttttagctctggatatgctcttactacatccaaatcagacacttcacttcaagggccagaaattttgtcaccgttaaatttttaacaggctttttagggaattgaaatctttccagtgagactatattgaatttggtaacagtcatagaaatgaaagagaggaaatttgtaacatgaatgacgatatagtttaaaaagatcaccacattcaaaggtttgtccaataattttttttaagtctgttttaattttcagatttttttctttgagtgttacttctgatacagtacagtgtgagcaatcagagtggctgggggaggatagccgcttggcaaacagttttaggtgtgttacttggttttccagctagggaattttgatttttttttcttcaaataatgacagtttagtgttaattaacattaaaccgggagtgctttttcatcattttccttgattaataatctgaatgctcttgttcctgtcagctagttgatcaattaaaatcacagtatcttgtaatcagattcctactggtattatgatgtagtttcaatataatttgcttaaaaaggagatgacatttgtgccaaggatgacaaaacttctttttaatacctcatatgtatggttttgctactttttttttctttgttcttgtgataatagctgtttttcgctcctcccccataaaattcttctcaggatgtcacaaagaaaggagttagaaatttagtgagccctgccgaaaaaaaaaaatttggcgacattaatggtactattaagataatatagaaaatttagcatagaaacacacaaaagagtcaactttacaaaattccgttaatcagaaaaaattgtaatactttgaacatatttttatacagatggtatttcattgtacatatggttttatagcccatactcactgtacagtaaacatctgtattcttataagacacatttttgaatagctggagattattatattgatacaccataattatttaaccattttactaatgttggacatatagttatttgtgggggaacgctattataaattcttactcaaaataattacatacatctctggttgtttttgatttttttaaaaaagatttcttatgtcttaggagtcatcaggcttcttcataatgagcagggatagtcgtcataaatggcccaaaatcctgtgactccattaattttaaatatgcttctctctttgcaaatcattataaaatctatttaattttcatgtgtggagtaattgtacaaatgagaaaggaagtctgttttcttttcaaaggtttttaagtgattgtttttattaatactccttaagacacacattgtgtttcccagtcaaccaaatgcactctaattcagttgctttatataattggatctgaaatttggaggtgtgttaattgacataagtgcagttctactcaggataaagatttaagaattttaaaggcatgcgctgaataactttcttggatgtttttagccaaacaagattttttggggaggtgaggaagatagaacacagtttatgaaggaactagattataagtaaatttctgtacagtttgaggctagggttgtgggtaagttaagataaaatatattgaggtgtccgaccgaagttgactgggaggaacacagcaagaatttaagaatttttaatgctgcaaacttatttttgcatctctcatgaacaaagaaagccagtgcaggtaggtaaaaagtaatgtatacttaggaaactagaagatagaagttctgtcagcaggagaattgatggcaagtataagagccccaccaccccgacaaaaggcaggattataggggattcacactctcattacccattgacccggaatgtcagaaatactttcttaagggtattgtagaagtaattattagttaggttttttatttctccttcctccatatggattttaatatagcaagatttaatgcatcataattcttaggagcacaagttagagagtcagccaaatctgaattttcagttctggctatcactaaatttatctggttttatcatctctcttctttgtatttcatataattttatctcatatcaggtacatgattgtgattatcagcagcctaaagtagtagtcttccttaaaagatgccgttttatgggagtaaacattctctgttttaatctactattcttttacgtacgttgtctggcaaaataaaaatataaatatgagataggtggaaaaggaaaaatatgtgacctgtgatcaagagaaacagaagacagtcagtagaagcaagacccacagatgaccccaattttggaaatggctgataagtactttcgagtagttatgaaaaatttattgaaggggcatccagtttctgatctggcttttaaagagcttggaagtcactcctgtctacacaataagaggaagctcaataatctgaaaaccagccttttgaaagatccatcaaagaactgaagttacaggacaaactgatgcccccaaatttggaacagaaagccttgtgggaaccgtttcagggttgcagaaacttggtgagttgctggaggctcattgaggacaagtttgagagttaaaagctccagaagggcccagtcagaggggcttccacacttgtgtgtttttctgccagcaaccttaccaggttcttacattgaagattggagaaaaatctctttgttcgtccattcaggagaggggaatggactttaaaacaagcccaaaacatctgggcacggtggctcacacctgtaatcccggcactttgggaggctgaatcatgaggtcaggagttcaagaccagcctggccaaggtggtgaaaccccgtctctctaaaaaaatacaaaaattagccaggcgtggtggtgggcacctataatcccagctactcggggggagaggcagagaattgcttgaacccagcaggcggaggttgcagtgagcagagatcacaccactgcattccagcctgggcaacagagtaaaactgtctcagaaaaaaagcgcccaaaacatttgactctttttaacatgcctgccctcaaaagaaattatttcaacagagcctaacagactgagattttaccagagcttaacagacctggttggagggaaatacccaactccagtcccttctggtcgtcctgcctaacctgaggggaagcgggagtgagacccagggccccaggctcactagaagactgagaccccagtcataggactgtataacactcccttttcactgcccctcacccgacaccctaccagcacagcattaaaggcctgtgtagtgggattcctttcaccttgtttgtcatgtctggttttcatcagaaaattacaaagcatactaaaaggcaaaaaacacagtttgaaggtacagagctagcatcagaacaagattcagatatgggaggagtgttggaattgtcagaccaggaatttaaaagaactatgattaatatgctgagggatctaatggaaaagtagataacatgcagggactgataggtaatgtcagaaagatggaaattctaagaatcaagaaaaatatattgaatgtactgcaaaagatgaacaacgtgtgaggaaatagcagtttcagcagagaaatggaaatcatttttttaaatgccagaactgaaaaatacagtatcagaaagaaagaattcatctgatggacctaatagcagacaggacccagcagaagtgattggtgaacttggaaataagttaatagaaattatttaaagtgattcacaagagaaaatgaatttagaaagcaacaacaaaattttagagcattcaaaatatgggaccatatcaaatcgtctgacacatacgtaattggaatctcagaacaaaaggagaaaaagagaaggaatagagcagaagtagtaatggaagataagttttgaatattgatgatagatatcaactaacagacacaagaaactcagcaaattcctgaaagtataaagaaaaccacgtcataataaaattgctaaggaggccaaggcaggtggattacttgaggccaggagttcgagagcagcctcgccaacatgatgaaaccccaactctactaaaaatacaaaaattaggctggtacagtggtgcatgcctgtagtctcagctacttgggaggctgaggcatgagaatggcttgatcctggtggcagaagttatagtgagctgaaattgcaccactgcactccatcataggcaacagagcaagactctaaaaaaacacaaaaaacaaaaaccaaaaaccaaaaattttgctaaaggaacagagatgaagagaaaatcttaaaagaagaaagaggaaaaatatacatcatgtaaaagaagggaacaatgttaaggatgacagctgacttgtcatcagaaacattggaccagaaaacagtgggtaagtgctaaaaggaagaaacttgtcattctataattctatagtcagtgaaaatatcttttaaaaatgaaagacattttgttcagacaaaagtctcagagaattagtcctccagcaacctgtactacaaaaaattcttaacgcttcagggaaatgataccatttggaaacctggatctgcaaggagtccagacaaagtaaatatgggattaaatagaaaaggtcatcaataattaggtctgtatctgcttaaaagactagtaactgtttaaaatttatggcatttataatgtatgtgacagtaaaatatgtgacagtaaatgctgagtgtgaaagtgataaatagacttacactgttgtgttttacattgtttatgaagtactatgttatttgaaagtagagatgagttaagggtacatagtataatttctagtaaccatcaagaataacatagatatcaaatgaaatcctaaaataatgatttgattatcccagaaggcaagaaaggaagaacaaaggaagaaggaacagaagggccaaatggaaaacagtcagatgatagattgaatcctaaccacatcaataatttctttaaatagaaacattttaaacttcctcttaaaaggcagagattatcaggttaaattaaaaagtgagactaaaatacatgcattttgaggatgaagacactgatttaaggaaagttaatgaaaaaatatgccctgcaaacacaagttataagaaagctggtgtggttttgtgaatgtcagataaaatagaatataaaacagataagccaggacctttaatggtgataaaagagtcaagaacacagagctttaaatgtatatgtacctaacaagaggactgcaaactacatggaataaaaatagaactgaggggagaagtaggcaaactcaaaatcatagttggagattttaacaagtaccgctcagtaattgaaagaacaagtggacagaaaatgtgtaaggatatagggggtttgaacaatataccagccagtctgacttaattcatctttgtataccaaactcccaagttgtagaatacacattcttttaatttcccgtgaaacatacaccaaaacgggacatctggtaggccataaaatagtaagttttaaaagattaatatacagagagtgatgataatgagataattataatctttttagataatgctcaaatattggaaaatcaaacagtatttaaaaaataatccttgggtcaaagaaaaactcaaaagggaagttagaaactattgctaaccatgtggtagtgaacacaaaatgccattgtatttgtgggattttgttaaagaagtgtatagagaaaaatttgtagctttaaatgttatgttagaaaagaagaaaggtttaaaatcatgagcccatgccttaggtagggcccttggtgttgctcagcattcccgttgtaatctctgtgttaattaatttttgtgctcttagttgcctatttcatatctttccacctcgcacctccccactctgctgatgactgtgcttcttatttcactggtaaaagaaaagcaatcagagcagaagtaaaggtctccctctgacacattgcacgctgataggctctgcatccacgtgtcctgttcaccctcccttaaatggatgggctgttcatgctcctatccatgctgtctcctccaacggagcactggatcccatatcctcagggtgcttccaggatacatgtaccttctttcttctctgtattatttttccccctctttctgtgtcattctcatcaagtataaatatgcaaagaagtctcccaatttgagtaaatttcagatcatcctctccctgtcatcccatttcttgctcccacagcaagattccttgaaggatgtattcatatctccatggcctctatttcccacattgtttgttgtccccattgagatttcatcacactcaacgcttttgaaactgtgcttattggcatgaccagtgactcgcatgctgctaaaatccagtggccaggatcagccttcttacttcatctgttactggcatgcgactcacagataactgtctcctctggagaaactctcttcacctgcacagtggtccgccacctcactctggtgtttttcctacctcccaagctgtgctttgtctcctcagtgatcttccccacttggctcttctctgcctgttctcatttactaagtgacctcatcaggttccatggctcaaagtaacatctttatgctgatgatgttcaaatgtgtgtcttcagttctgacctatctcctagtttcaaacttatatacaactgtacaactgtccactcggtgtcttcacttggatttctaataggtatctctaatcccacatgtctaaaatttcacttatgatttctttctctctttgccagccatcccctatctgtcttagcaagtggaagctctcctcttacagtgcttttgattgtcttctttctctcctatcagagacatccagtccaatagtgaaatgacgtcagtcatcttcaaaatgtgtagcaagtctgtatgcctgttagctgccctgatgtcactattccgatccaagtcactatgcctcttgccttctgttggatttccagtcactccccaccgacccccgccccaacacaaagggaagggcatctatttctctgtcctcttcttctacccttttccccatcactcactagcctttagccacactggcttccttgatgttgctgacatacaccaagcacatatttgtcttcagcctggaaggttctttccctagatattcatcttccccctcttcagtcacttgataccatcctatcagagagggcttttgtgaccactgaaataccaccacccacttccttccactctgttctctataaaaaatattgctttattttccccatagcacttattttcaccagacatattgcttgtttattgtctgttttcctcaaccataatacacccttcatgagaacaggggctgtgtccacaagtatatttcttcaagcaacaaggacaaggcctgatacacagtcgatgcttgaatatttgctgaaaaaatgaatatgcttaataatcaatgtctgttatctaagttcttaaaatgcttagaatattgtaaagaagtattttaaaagttcattatagttaattatggttgacttttctttctgtttttcttaatttttcaaattttctatcatgagcatgtgttagttttataatcaggacggtagcagtagagtctttaattggactttgggccatttttcctaccgtttactttcctgtattttctgtatttcttacaataagcatgtgttgcttttataggagaaaaaataggtttaaaaaagaggaaaaaactttaagcccaatattatgacttgttattttatggaattcaataggaactgacattacagatactataataaagtttcttttttaacttttcattttgaaatgattttagactttaaaaagaccaaaaacagtacaaagaatttccataaactttcacccagatttcccagattttgttttacatttcttctttttctcagacttctcttccactttcccaccatacaaatgcatgtatgcatatatattaaaaatgatctcttttttgtctcctttaatctgaaatagttcctcagtctttctgtgacttttatgaccttgacacttttatgaccttgacacttttatgaccttgacactttagaagggaaacagcatttatgttatggaatgtccgttggtctggattttctaatgtttcctcgtgactggatttaagatattgaaagaaatatcacacggtgatgatgtgttctcccctgtgcgtttcattaggaagctcatgtgtctgcttgtgtcataactggtggtattgactttcatcagtggattgattaccccaagtttctgtaatgcaaagatttttttccctatgtgattaaaaagtgtcatatggggagacactttgagactatataaatgttctgtttcccatccttctatgaacccactagtctcagcatccattgatgatccttgacagaaacagttgctgtggtggttgcagaatggtgatttttttgtcatgccataatttcttcaacattagttagtaagcattctgctgcaaatgctttcatttatttccctatttatttacttgctcatttatatcagtatggactgatggattattttattctgtggtttataatccattgacttattttgatccttacgtttttccacatttggctggtgggagccctttcagacaggcttctgtgtccttttgacatctccccaccaatctcggaagtaaagtcctttgagtaccttactctttctagcacagcaatacattctaggttcatgtggttttctgccctcagccctggagtcatttttccaagaagcttgattccttttagtggagtacaaaaagccaaaatcttgtcaaaccaagatctaggttccagtgtgtgtgctaaaatttatgaaagccctagttatgactgctcttttgttccccagaaaggactcatacaagataccttgattgtttccagtaaatctttacttttaaatacagctgaaaatccacgtacagtttttatgctttggcaatttagaggtgtgagacaaagtcaaaacattagtgattttctttatactttgttttccaaagtaaaaaaaagtttcttttaagctattcgtgtcttaaaacaactgagtaaagtgtagtttcataaacaaatgaaaacatttacctttctctttacctaaactctctttacttaaaactctctttacctaaattctctttacctgaaactctccagaatttagaaactatttatcagtggctaaggccaaaataattgtcactcagttactaaaaataattcattattcaaaaaataacatataatttcatgtcgtgactgaccccatattactaacaatctggccagcctacaataaataacaaaattgtttttcccccaccaagaaacatgacttcctggtaataaaccttcccaatactaagaaataaaaaaaagtcttatcattctaacccaaacaaaaattcatcgtcaatacttccattaaagtttttaatttaaaagtacagttaatatacaaatatatcccaattttgttagttatgttttctccgatctgtaactcactttcatggtatttaaaattatttattttaaataaatactaccatatataatctatagttccttgtaatagtcccattaaaatagattaggtacagaaaaagactacatcaagaaaaaaacgagatcatactaattaaagaaataaatacagtccaaaacatgttttctaataaatagacaagtatacaccccaaacctgatactcattccttatgactatgacaactgtgactaaagactatggactttcctagagaagagccttcccaactacataatacaatcactgctggtcttgtatatacaacagagggttgaattacgaccagaagggggaacttgtgagacaaagtaacaaaagtaagaagccctttgcttgttcgcttggcttgccagcagaatttcaacaaaatcccttgtcaacaaaacttcacaaagtgcctgactcaaggactgagagcagccctctggaagaatgccctaaagatgatacacggggtagagcgcaggttctaaatcactgcattttccaaatacagaagataatgtctaaggattttgcttttatcatctgtaaccagatgtatcctcacattttactctattgtaacttgtattaggttggtgcaaaagtatctaatgttacttctaaacacatttgatgtacctgctagacacaggcagggccgccatcacttatatataaactgtgggccaaaatactactttaaaatagtataacaactcttgagaagcctctcccgggttacattcctcagtaagacttacaaataaagctaactttaattcttcaaaagcctgatttttctttagttaacagaggcatttatctcaacctgatgtatttggacatgagttcatgtggtactaataagtccagaagtggaacctttgtcaacaaagaatgaataaattgcatttacctcaatgtgctccataattcagaattagtttagctattaatggacttgctattgaaagagtgagtagaattcagcttttcaaatcatttgctgtttgcaaaactgaagattgtaattataacactattcttattcatcagaaaatatagctctttccatttttttctcttcagacacttgtcagctttcagcagctggcaaaatattaattatgcaagtctctaaattttatgtccctttataaattgagaacttctgagtggaaatgtagtatcagttgcatgtttttcaaatagggttaggcatcggacctagaagcaaatgttgcttgtccttttctgcttatgcagcatcgagctgagagtacatgatgttgttctcaacaatagttggtgtgctttgagagtattgctgtcacttttgcaagaggctattgtgtatacactcccatagtcttggtgtatatgctgtccctattaattagttttctgtacagccgaaggggatgggatgggagcttttaaagttggactggagtatgtgtgtatatataaatttattttaaactatgaatggtcaagcagaaacacaataattggtttcattttgtgactatgtcagacattcagaaataaagaactgatagacttgaatatgaagcatttggaacgtggtgctcatctacaaaacacccagcatttcaccaaatggattctataaaacagtagttctgaaagatgttattaggcgtttccaggcccagtcactatgagaacatgatatgttagatgcttctcttgcagattgccagtgcacattagcttattaatgactttaagacaccccaaggcatagaaacatgtttaatccttctagctcctcattgcccagcctgccttgagcaggaagcatttgttggctttgtgcttgttaacaagaaacactggcatagatcatgtgtttttcattcagctgatagttgttgagcactggctgagcacaagcagtgcagaggtgaaaggcagaactccaactctcctagagcttagatgaatgaaggcaagattagagttccctgacgagtcctgtgatccaggtcagcttagggcattgtggagcacagagggggtcaaatgctcttacagagcccagtctacatcctgagttagccaggactcagttcttatgtttttgttcacttattccgaaatcttttctgagtacctactataagccaggcatgctctagacattggagactgatatagcagtacacagagctaaggggaatccttgtctttgtggatcatatgttctagtggtgggagacagatgagaaacaagatgaatacatacaagtgcataatttattacttggtgattagtgctagtcaggaaaatacagcagagcagggataagaggggtgtgtgatcacatgtgtgatgaggtgatggcatttagccagggctgctaggaaagcctcacttagaaggtgacatttgggtgtagagctagaggaagtgagggagcaaaccatgtgagtttctggagcagaagtggtctacgcagaaggaactggaaatgcaaaggcctggggagaagggggatgcttgggtatgtctgagaaacagtgaggaagccagggtagttggagtgggacatacaagcgagaggttaataggagatgaggcccaaaggtgaacggagctaggtcgtgtaggagcttataagtggtcatctggcctttagcttttattctgagtgaattggcaaggcatggaatggatttgaacactcagaggagtaacaggatctgagactggtttggacaagatgactggggctgctcggttgagagtgaactgagcaggggcgtggatggaggcaaggttgctggaagaccaatcccttggcggttagggaggtcgaggtgagtggtgattatgccttgggacagggtaggatcagggcaggtggtgcgtgcagagcagtcagaccctggatatattctgaaaatggatgtgtatgacagtttgctggagagccagtgtggagtgtgagtgattgagagatggcaaggatgaccctaaagtctgtgactggagcaacgggaagaatggagctggctcttccaagaggggaagatgggagagaagcaggcttatgagggggtattaggactccattcagggcaagttatgtttcagttattagacacccagtgatgctgtcagtaaggagtttgatacatgcatcaggatctcaggaagaggcccatctggaggtagaaatttaggaatcatcagcatagaggaagtgtttacagccattagaccggatgagatgcctaaatgaatgttgatggaaaagagaagaggttggaatatttaacacagatctttttttctgtgtcagtagcttttaaaagtggagtttttggaaatattaaaacactaggtttagaagcagaagtaattagcttttgttttttgtttggtttttttttttttttttttttttttttttttttttagcaaaaagaacttttgttaaataaaaagaaaaagccaagacctcgagccctggactcctgtggaattttgagtctggggagggaggaagcagcagagggagcagagggcccacgaggcaggagggcacctgcaggctcttggcaggcaggcttggcctgggcatcatggtcagcactgggccatgccagagagaggccggatggatgaggcctgagaactggcccttgacttagcagggagaaatggtctgctgagttgggtcagccctttcatagagtgatagggcaaaaacaggactggcgtggggttgggcagaatggggaaaggggcgaggacagagcagcatggggtactctggggaagctttgctgcgaagggaggagagtaagagtgtagggtgaggagcaggggaagagggagggtttttcagtgcagaattctagatttttatgattttcttctccaggtttttaaaaaaaactgtgataaaatttacataacattaaatttaccttaacagtttttaagtggacagtccagtagcgtctttgtgtgttgctgtaaaggctgggtaacttagaaagaaaagaagtttatttagctgatgattgtgcaggctgtacaagaagcatagcacgagcatctgcttctggtgaggcctcagaaagtttccgctcatgaaggaaggtgaaggggagctgtgtgtgcagaggtcacatggagagagagaggaaacaaggagtgggaggtgccgccaggctctttttaacagccagctctcacaggaactactagagcaaaaactcgctcacccagggagggcattagtctattcacgagggatccacccttgtgatccaaacaaattctatcatgtcccacctccaacattggggatcacatttcaacatgagatttggaggcaaccagcatccacgctgtagcaagtaatgttaaccactgtgtacacatggctgtgcagcagatctccagaatgttgtcatcctgcagaagcaaaactctgcgctcgttacagaactccccatttccctcttcctctgacccctggcaaccaccattctcctgtctctatgaaatggactactttacatgcctcatataagtggaatcgtacagtatttgtcttttgtgactgattaattttgcttagcctaatgtcatcctcaaggttcatccatgttgtagcatgtgtcagaatttccttcctttaaaggctgaataatactccattgtatgtgtgtaccacattttgtttatccgttcatgtattgctggacactcaggttcttccacctctgctactgtgaatagtgcttctgtgaacataggtatgcaaatgtctcttcacatccttgcttgcacttctttacgggtatatactcaagtagagttgctgggtcatatgtttaattttggggggaaccaccacacagttttccacagcagttgtaccattgtacattctcaccaacagcgcacagggttccaatttctccacattcttaccaacacttttctgcgtttttgtttttgttttttaaatagtagcatcctaatgggtatgagaggtggtggtgagagggatttcagtcattcttaaaactgttaaaatgattgaaatcatggcagatttgtaagaggagaaatggtaggtaaagcacttgggctttggtctgcccctgtgagtgctcaggagtgtcagtcagctactactgtgaggaagggggtgcccatgcctgaggcagagggagcagagcagctgtgcagaagcacagagtgtgaggaagtgggagagtgtggggctgcaagtagtgcattctggctggagcaccaggcaagggcagaaatgaggtgcggccagttagaaaggctactattaaaaagtcaaaaaataacagatgttggcaatgctgcagagaaaagggaatgcttacttactgtaaacatggtgggaatgtaaattagttcagccactgtggaaaggagtttggagatttctcaaagaacttaaaacagaactaccattccgtccagcaattccattactgggcatagacccaaaggaaaatggatcattttaccaaaaagacacatgcacttgtatgttcatcacagtgctgtttgcagtaagaaagacatggaatccacctgagtacctatcagtggtggattggataaagaaaatgtggtacatcatgggatactacgcagccataatgaagaatgaagtcatgtcttttgcagcaacatggatgcagctggaggccattattgtaagagaattaacacaggaacagaaaaccaaatactgcctgttctcacttttaagtgggagctaagcactgggtacgcatagacataaaaatgggaacagtagacactggggactactggatggggagagaggaagaggggcaaaggccaacaaagtgtctcttggatactgtgttcactacctgggtatgggatcattcattccccaaactgcagtcactcaatatacccatgtaacgaacctgcacatgtaccctctgaatctaagataaaagttgaaattattttttaaaaaaccggggaaaaaagaaatgaagtgcagtgcacagggccctctgtgtcatacacatacacatacacatacacatacacatacttattagattttatcttgaaatgacgaggagcagtaaagaatttaaatagaaatgacgtagtcagttctttctgttagatcatttggcagcagtgtgatgcatgggttcgggggtgggaggtgaatctaaaagctattgatgtaattcaggagagaaacgagggtctggggcaagatggcggtgggtgtagaagggacaagacttggtgttgagttagccgtagagagagggagctgtcacaatgacaccatttctggcttgggcttcattttggatggtgggttctttttaacatggggatgcaggtttgaggtaaggtgaaaaggagttatatttcagcttgtacaggatttgagaatcttaacagacgtcaacatggagatgttcagtagctagttagataacaagtctggagctcaggaaggtgttcataaagcaataaacgagcattaattctggatgctgcagctagttatagtattttaaaatgtatatagtttgtgtgaaggctttatttttttgcctttgtggaaccattttgcatattatgggaatgggaactgttgacagaattttaagtgaacccagaagaccatgctgtggatattgagctttaagagaagcaatttaatgcttagctgaaagctgaaatctgggtttttctctccttttttggtgggggatggggtacatgtttattgatttattcttattttctaagaggaattcttcttgttaaaacagttacacagaatctatgaaattatactaattttaaattcataagaattcattcccagtgtctaggtgtaaccatttaagcagtaaaatattttagtccatttcattaagtagataagaaattatcgagtgtttcatggcatgaaataattcatgaagattgcagccaagggagtccagggagctatgtgataaaagcagagaactaaaagttagaagaccatatttttgtttcatctatttctgccatgtactagccatgggatttggacggatcacctttctgatcctctgtttagtcagccagagaatgaaaacattaacttcctgtttacctcccgggctcacttattcattgaacaggtgtgtgcaggaggcatcacacagggctaaggctaaaacatggaacacacggagttcacagtctcatggattatagcaaagagtacagaaagtggctgtgaaagcagcgtataaactataaagcaccatgggaactttagggttattcttaactctaatgaagttttcttcctgggaggttcaggttctctctctcatttgagtgataaactgatagaaaatgaaaataaaaagaagtggtaggtatgtctgtcagaaaagttaaggtgagatgtgccttgcacactcagagtaggcagctatttaatatttgttgcatggataaagtaatggtgttaggatttggaaattcagtgtaagcagataatgattcttatcttgcttgctgaattttcagaaatgttacattttaagaaaagtgggagttatatctggcactcagaggaatgtggaaatgagccacgcagaaaaatttaactcagaattcaaaatcttggtttatagagagtgcctgagtcagcgctatatacctagatttcacaatattaattagaagaatttaatgccattggaaagtgttaggcacaaataaaatatctaatgtttctgattgtgaatgagataaaatcccagatttaaaggccaacatgataattgaattatcttgaggaataagtgaaagtttggttcctgagattgtatttacacttaaagcgtgaaaaatgagaacttaagttgcagttagtgggaagcaacttgagcgatagctcatgtagcaataaagattctatactgtctgggatattttaaaattctacaacattgagtcagtttcagatttatatgagtatctctaataaacttcaaaagttctaaaggccttggactgtgacactttattttcatactcgtttgcacaaaatcccacatgttgacaggaataagcactggtgaggatgtgtgagggccgcttcatcagctccctaacagatggccttctccattcattttattctacaggcaaacatgctgaagacatatttggtgagttgtttaatgaggctaacaacttctacatcagagcaaattctcttcaagacagaattgatcgccttgctgtcaaagtcacccagctggattcaacagtggaagagggtaggtaattgcctgaaagcagtgagctagaagtgatgttgacaagatggtagtaattaattgcagtgtaattactgctttttccttgggatggcatgctgatatttcatcttgtctttcctagaagaatagcgagggggaaaaacctacaactttgtgttaattcacgatgaaaagattcatatgtggtctacctcataactctatactcttttttaaaaaattacaaatatagtatttgttttaaaggcttctttgaatacagtcagtattagaagccccaatttaggttactgacagttattttaaaaatagtttcttacctaaaacttacagagccactctagagatatggtccaactgagacagtgttacacataccttgtgtgacacaagcacctggtgttcttaggattgatgcctgtaaaatcctggtgattctgctgatttaaaaattttgttaaccttctcagaaatagcatttaccgaaagcctttaggctgcaggctttaaaataatgttaatgtcgacaagcattgtatagttaactgatagtcatttgatgatacaccctgaaattgtcagtttcaacaaaattgaaactatcaacgatcccttttttaaaattttactttcagtatcttgaatgaaagactcagattgagctggagaaaatatgcttaaaaagtacaaaatataccacttcatatttattttgagaaaaatatttaggttaaaatttagttttacctttaaataatggcagttaacaattgctcttgttgctttgaaaagatcctagtgtctgatttttgtgctatatctatagagtagtattggtaaaaataatgcttttattttttaaaaaaagtagttgtggaattcatctctcatcatttaaaaaatatatgttatctcatgttcagtctttttcaaaggtcaaaatttgattagtgaattacaaatataacaaaaatgtaaaacattgattttaatattcattatagaagcattcttacttttccaacaataagtattagttggtctgttcaggtaaggaattcttaacattttaaaccaatcattcacgttttaaattagctattcatctttcttcaactttttgttggctgttgccgttagaatgcttatgataaaccttaccctagaaaagattaattggtaaattaaattttatgagattttatagtacatgtcatatctttaaaatccttttccaaacaagattttaccttattactttccttgccatggatgttacagtagaaaaaatacttgactgacaggaagtctgtattctgttttggtcttgccacttttttgctggagtttttggaatcttaacatttctgaagctcagcttcagtggttgaataggtaggttaatagcctagtctgtccacctcaaaaagtttgatgaaagtcagatgagttggctgggcgcggtggctcacgcctgtaatcccagcacttcgggaggccgaggcaggcggatcatgaggtcaggagatcaagaccatcctggctaacatggtgaaacccggtctctactaaaaatacaaaaaattagccggtcgtggtggcgggtgcctgtagtcccagctactcgggaggctgaggcaggagaatggcacgaacccgggaggctgcactccagcctgggttacagagcaagactgtctcaaaaaaaaaaaaaaaaaaaaaaaagaggtgagttaataaatgaaatgtaaagtgctgtacaagcacaagaaagaactttacccagccccaattttctgaatccttagtgtaattttgtatcatcgatcaagctacttaatttttgggactagatacatgttgaaaagctttgccatttgccatctttccttaatgtttgtttcagaaaaacttaatgtgttatttccatttgtgtaatttttgcagaagtatttcccacatgcattatatttaaactaatgttgtttgaacggtgttttccttaggatattcaaatctgtgcatttacatgcctgttacattcataactatattcctatgtgatttctgagaaatgctatttaaataatgttactctagtattaggttcagtgaaataattagattactacaaaaaaaaagccatgatttgacctcatttcatagtgatagctattatctgtgaaaggaaaggaatgcacatgctcttaaacatggtttttaaatggacaataaaaaatattatttggttgttctaggaggtgtttttaattgtgagtcaaatggtatttacttctaaacagttaaaaatatttctatataactcaacttgggggattttctctaaatagtctcactacaggatatcaacatgaaaaaagctttcaaaagttccacagtccaagaccagcaagtggtttcaaagaacagcattcctaatcctgttgctgatatttacaaccagagtgataagccaccgcctctgaacatcctgacaccatacaggtatagcttcatgagtcccagagcctctccttgagatgaggggagagctgggcagagctgggagcaagctgatgcattgtgtgggaatgtccttgatggttcatctgggttaaaatcagaattgcttcaaactttgaaaataatgattgaattatatacaatgaaactactcattggtacataattattaaagttacagtatttcagcatattgatacgtttaacagtagaaatgtgagttctgattttaacttttagatgtagctaccttaagtagaagtgagtaagttgcataacagtattgtgtgtggttatgttgttgtttttagattcgaagtcaattaggaactgcataattcatttataatgcagcaaaatacctgtttcagcactgcagagacatttgatatttaattcagaaaaaaatgtattctgtagtgttaggggttttgaagagtgaaaatatagtcagcaaattaaccttctgttactggaaaatggtaggacacgttatcaggacgagacttccaagaaaaacaatggaaaataaatagtgcaaaaaaataatatgaagagactaactaaaaatgctctttctaaacacccctcctgccttctcccagctcagcactttcttcccatacctgctgtcacctcttgtcccatatccctctttcacacactgtctctccatcccttgtggtatgtcctgtcctctccccacctctgtaccctcttgtggagctcatcctttggcctctgacaagcacaggctgtggtgaccagtggtcctcacagccccgggccagctctctggtgattctcctgtgagaaccttccaggagcctgcgagttctccacttccattactaccctctcagcagtcctaccctcaggggccctttggcccatctcagggagtgcatagaatttttcttggtcctaattcctgtcctttctcagggtccacagggagatgtttggagccaccctttgttgcagctgtgctaggaaagtgcagttcaaactacaccactttctttccgcacagacagggagaggctctcagaaaaacaggccaaactgatggcagaggagcaagatgccacgcctttttatggaaaaagtagacttttctggaggttttagcacacttatttaaaaaaattaagaatatgtatgaatatagcattatgagccaaatattttaatttatggctttgcatttgttcaataggcattttcctggggcagtttcatttttacttagcagtgaagcctcaaacacaatgtaacatgtaggcttgctcatgaaaactttctacctgccgttgctaagaaacctcactggaaattctgttctaaggaaaaaaaatcagataacccaatgaaccactacattgattagatcatgataaaatatttgtagtgatttatagttgtagtgatttatagtatgaaaactgatttgactttcacatatatatgtgtgtgtgtgtgtattcagtcttatggaaaataaagcatatctttgactttttttttttttttttttttttgagatggagtctcgctctgtcgcccaggttggagtgcagtggggtgatcttggctcactgcagcctttgcctcctgggttcaagcgattctcctgcctcagcctcctgatatctttgactttttaatagtgtgtttaaggatagcagtgccagcccaaatttgctttttcattaatatagcaatatttggggtatataacatataaattttcacatttgaacttaaatatggcactgtaacaatattgtcttaatataagaagtacaaagtgactgaaaaaaaaatttttttttttgagacgaagttttgcttcactcttgttgtccaggcaggagtgcaatggcgcagtctcagctcattgcagcctctgcctcccgggttcaagcgattctcctgcctcagcctcccaagtagttgggattacaggcatgtgccaccaagcctggctaatttttgtatttttagtagagatggggttttaccatgttggtcaggctggtctcaaactcctgacctcaggtgatccacctgcctcggcctcccaaagtgctgggatcacaggcatcagccaccatgcccagcctaagtgacggaaaaattaagtgtttagaagctataggaaacaacagatgctggagaggatgtggagaaataggaacgcttttatactgttggtgggagtgtaaataagttcaaccattttggaagactgtgtggtgattcctcaaggatctagaactagaaataccatttgacccagcaatcccattactgggtatatacccaaaggattataaatcatcctactataaagacacatgcacacgtatgtttattgcagcactattcgcaatagcaaatacttggaaccaacccaaatgcccatcaatgttagactggataaagaaaatgtggcacatataccccatggaatactatgcagccataaaaaagaatgaggtcatgtcctttgtagggacatggatgaagctggaaaccatcattctcagcaaactaacacaggaacagaaaaacactgcatgttctccactcataagtgggagttgaacaacatatgggcacagggaggggaacatcacataccgggcctgttggggggtgagggacaagggggagggatagcattaggagaactatgtaatgtagatgacaggttgatgggtgcggcaaaccaccatggcacatatacctgtgtaacaaacctacatgttctaaacatgtatcccagaacttaaagtataataataaaaaagaacgtatctgtttatattcttgtcaaggttaacatttgcttacttaagtgagttcccgccttcatgaaggtactggctccattttttaaaaaacaaatgtacctcttatatgtcttaaattttgcagctttttctagacctctacctattcaaggccttggtatcttagggaaacaaattatctttttcacaataatgttattaataaaatctctatcatgcaggttgcctatcaattaggaaactaggaaaagaaaggaaggacattaatagtcaaaggttaaggtatagtgtgagttgcactggctcttcagtgattttcagacatagcgactagaatagccccataggcacccaggcctttgtatttgatggtaagacacttaacaggagatggcatagcaggggctttaatgacagacctttgttttcttctgaacaattaaattagccattgactgtttgggcataaactctcctatactcatttaactgattttgcttcccctgtgttccttaatgactcattgaaatgctgatatgaagtaatataaaatgttctgcctccttttgaaggtagtcttcaaaagcattaatagaaaacagtgtttactttgtatcatgatggttttgatcatgacttgatttatatgacagttttggacctctgctagctccatcattggttttatgataaatgagctacttatatgaagacttaaaatattctttagaccacagtaattgcctgtgacagtgctttaaaatgaaatggccacaggtgaataaagtttctgtgtaggttacttccagtttgaaaatacatagttcatcactatttttccttacattgatgccccataaacattttgcttctttcctaattgaacttatagatgttgggcaaaccttattgagaaaaagagataagagtacttactaatttttatcctaatgatattgaagctccagtgtagaagtgaatgtgttcttagtaagaatccatccatctctgtgtatggccccatgttggaataagcaaaaaatttcctgaagtgattgagatattataaattgctgaatatgagtcatgttgtgattttttttttctgagcaattttctatactcaattctaaatttgcaagagtacttttaacctacaacaggttattctacaacaggttgctattttatgttttcacattttttcaaataaggaaacttaaagacttaatatgtgtaggagagtttaagtgccccatgtagatgttataatttcatgagttcaaatcaagttaacattaacctacatataaaagtctctaacaatcttttcttccctgacttacaatacattgatttgtagagatgacaagaaggatgggctgaagttctatactgatccttcctatttctttgacctctggaaagaaaaaatgctacaggacacagaagacaaaaggaaagagaaaaggcgtcaaaaggtaaataatttcagtatgggaaatgtgcatatcagtgttcaaaggagattcttgtttagaaatagtaaattatttaaatggttgagatattggatatagtgctgaagtttttttagaggttgcatttctcacaaaagatcctgacaattcagtcaaacacagtaatactatcttcaataaatactgatatgttctccagcacttgctttgctttaacaaaagtagttcctaaactttgttttgttaccatgttttagtaactcctctcctgcgttctcaaatttttgtaaagcagtcagtattccatatcagatacaatgatcatgcagcacaatgatgtgcttttgtcttcttaacatttttaattgtttggttgccttctagctgtaattaaaatcttgggaagatgttcacatgggattgagaagcatatgtgatttgcacgttcagcggataggatttactgaaaatgagcctccctttaaggggtaggggtaggaagagaattgcaagtttgaaggttgagaaatatctgcatgcattacaagcagtcttcaaaggagaagcccactctactcaggttaagggatttgtgttttgaaaattgttcgttttgggcccagaaattagacttaggccactgagaggaataattctctaagggcaagtatttattaatatttttatatgtcagctgtatttaaaaatgaccatccagtttgctttacagattagagcgctttatttaggagaaatgcttagcattttgtgagttgatagccttagggttttgaggcattgaggtgtgttggcccagtaggagtgacagtttggtctggaggagaatttgaaaatcgaaaacagcattaaagggaagagaacatgagaacagtttgcagactgtgctgttgtaagacaccatggctggttccgggaaagaggatgcaaaggacttggtcacacacagtcttcttgtgctcatggctttgggagatttaattgggatatatcttggaaaagttgctaggttttgcagaatattcaagtgaagaaaaaagaaagataccaatcttttgagtggaaaaggaacaaatatttaaaaagcatatttaccttaatcctcatgcttttttatagttacaggggaaaatgctggggcttacctgcctttaaaatgtgcctgtttttttaaaaggccttctaggtttcctttctcaatgatgcttttggcaaaactgtttaattttttgccactcttcttgaaggggaaacaatttttatgtatgaatattatgtctttaaaatcatttgttatttcctgtgctgttttgtctcattctaccttcctcaaacacataaaattctgataagaatttctttcattcacttatataatgacttgatgttgaatgccttctaaatgctggataaacagtggcagaaaaaaacaggattaccaccctcatggagaggacaatatagtgagggacacaggccttaaataatcatgcagccctcggaaatgcagaaagagggagagaagtttcaaaatgttcatataggtccgcttcatatggaaatagaaaatgaggcaagatattctttatttcccaggatttcagaaacccaaatcatgctcaatttgcagttgacaaatctgaaggaaaaattagtttagaaaatttggggattaaaaaacccatgtttttgaacttttgtctcctttagtttaatgctttaaaagccttaaaaacttaattacacaaataaatatgaagttttaaatatgtagttacactgttggtaagtttagtgaaggacaagtacagagcactctgagtgagatgacctggtgtgtgacagtgtacacacagtgaggggtcaaggaagacctctctaaggaggtgtcatgcaggctgggttccaagggagggtagcagaagttagctcaacagtgggaaggtgctacggggaggctggagaggtgtggggggcagatgaggtggcgtgcttccgaattgaggaggcttctaggtagcagtgtctaagatcatcctgggggaggaaccagtttggcagcttctaaggattttaatgtaggccagtgtagctggagcctggattcatcactgttcatattctttcatgtttggttcgcatgcgcttgtgtgtcctgtgtgcatgttgataggtagatttggaggctgaaccatggtgaagaaagttgcaaatatcataacacttcatccctgaatttgtcagcatgcatcttttaaaaagtaaggggaatagttattcattatttttacacttgatcttagccaaaaggccgagaagcgattattcattatttttaatacgatggttcttaatcaggatgcatattggaatcacattgaaatcttcctcccccacttttttcctttggtttttcaaagtacacacccaatacatgctggttgtaaaatactcaaatagcactcccttccctgggagtacctagccacggttaacagcttggtgtgcatcttttaagaccttttagcattcataaatatttgcataaacattttacgaagtatttgtgtatacatagttgtactacatatgacttacatacacacactgacattattaaaaatgtacttcattctttttaatagttgtgtagtattctgaaatataaatgcttcataaattacccattactgttgctcttacaatactgcagtggttatccctctacttaggtgcagataattcttcaggataaatttctagaagttgaattgctcttattgaagagaatgtgaattttaaattttgaaagatagaattatattgcccgtaatctttaaaagactgaagaactagtttatgttcttaccaggccttctccagtcctggatattactttcttttgatgaaagattgaatgtgttacatcgtctcatatgcttattaaccatttctttatcttctgtgaatttcatgttcacatcctctgtggatccatgcctaaagcctccgggatgcctctgaaaacggtccagttttctgtcttcaccacacccttgggccacctgctgttctttcaccctatacccacttagtagctttctcacttgtgtccctatcttccctcttttaatttgttttctgtaacacagagagatcttctccaatgccttctcagcatgtcagccttcccttcttgttctttaatgggttcgcattgctgttgggataaaggcctctaaggtcttcctgcctttcagatcttgggccattcaccccaatgtaccatttacattcttttatttctttgagtgcagtgctatcctcctccccagagctctcacacagtctgtcctctcctcttggcaggcacctgacccatactcctctgcagaattgatgccactgtcaatacactttcaatactctcagtcattccaggatgcctccctgacttccagactagacacacatacacacacacacacacacacacacacacacacacacacacacgtatatatttaaacataaaaatatatttgtgaaaataaatacatttatttttatggtacatttataatagtacctttatttgtgtcctcttgtggactgcaggctccatgagcacagatgccatgtctgtgtgtgtgtgtgtgtgtgtgtttgccatttgtgttgtcagtgcctggcgcagtacctcgggcatagcactagaagttcatgcttgctgcctggctgtggatttgatcatttagccagcatgtattgagtgtgtattctgtgtaaaaacagtatgttgagataccataagacaagagggaaacgtaggaaataaagacacatgattctcatccttaaagatcataaaattttgtataggaggcaggaaaaacttagaggcacacatagaaataacttctcacgtttcaagaagcacctgtttaagaactaagtatttgttgaatgaaacattttctggccaagtagggctagaggaagaatggtgctttttatgagcaggtaagtttttatcttgcttaattttgtgttaaactatttacaggattcacttattccgtaatcttttagaaattgggaacagaatgttttgaattattttctttgaaagataattgtacgttaagaagtcagtcaaaattgtgtggtggcgggaaataatttctctttatggtgtttccaggttgttcacccatgtaatatagatctgaaagaccttgtttaggtttaaaacaagttacaagcatattcaagtgaaagtttttttactttaatgaaaacgatggtaagcaactcttaacagttgtagcagggtaactttttgttgattctgttttgttggttctgttgggtaagaggagtgcactgctttagagtttctgtaacattagggtaatcgaaatgcgaatgtgtcttgtctgttcatcaggcatgggccttgtgcattataactgcatttaaccagctgttttcctttcccttctgtcttggcatgctctctttcctttcctggacatcaggagcaaaagcgtatagatggcaccacccgtgaggtgaaaaaggttagaaaagccagaaacaggcgccaggagtggaatatgatggcatatgacaaagagcttagacccgacaacaggttgtctcagagtgtgtaccatggagcgtcttccgagggatccctgtccccagatactaggtgtgtgtgtgtcactgctccctcagccctgatgcttgggcaactgggtactacctggttttattatcatttgaaatgcatcaatagcttcggggtttatatggcccttgatgtcttaagattttccttaaaaattgtttatctgtattttgattttgaaataatacttgaagacagtgttattttacattgggttcctttgattttagaaaatctctctgacttaaaatgtattgttgagttcatctagatgtagtgttttaacactgattctgaatttggggtaactgcttatgacttaagtttttactttaataatcatttaattctttctcttagcatggaatgttgaatttcctttgccacttggtatctaaaaatgattggcaggtggtaaagtaactaaggagtaccttcattgttcctttagtaaccctttgaaaaaatgatgaacaaaagagagatttacttcttatttcagataacttatatattctgatttcaggagaagaattctattggcgtttacttaaaaatttattagcagttaagtaaaaatatttcttgcaggcgtgaatgatgtggtcattaagtcacacttgtcaccaaaggcattcattgaacaacaggaaatgactagtcaattttaacgtttgattcagttttctatttctgcttttgtaaagttgtagtcttccatttgcataaactctcatcggcatttaaaaatttgaatagagaattcttacaatatgtgatcaagaatgtttcaaaacaacagcaacctggactttgggttgtatctgtgccctttttttctacctttgtaaaactcagtgtttagcacaaactcttaacgtattacgtgccttcaatgttcccaccccagaaggtctataagtcattgggaggatgtgaggcaagttctggtaatttttctgtacaaacttctatttgttaaatattagagaattattggagctttaactgagttttagcctcatttgaattttagtgtgagtttatttctatagaaagtaggaattataacacagttctgctcatagttctttgggtggggaggaatgtatgaacttaatagctcccatgatgtcaatctgcttttttgttttttttctaaataatttagctatgattgtttactcgtgcaaaacgtatactttgtttttatcctatatagacttttcaaaaatagatgcagatgggaaaatgatggatttttaaaaatctctcagttgaatgatactccttctagcatctgagattattccatgttggatataaaatggatggttattcagatatagtctgcctttgtatttatgttgcttacatacatctgcgtttctcttaattttcaaaaaataagtctgattgttttatttcttcagaattccttttgttgtctcctactatttcccatggcttcttactatttgcatacattatttactatcagataaatagattataactcatcattgtattggattataacccttaatttagaaatttttatttttttttactacagtgtgtcacttttttattataaaataagacatgcttattatatctggaagttacaggaaaaaattaaaatgaaatatgatctatagtttcaccatgcagagaaaccgttgtatgcattttagtgtatttctctttagtctttttctatacatgtgtttcttttttcttttacaaaattggagtcatgccatgttttctttcttttgacttttagaaattatatcccatgttttaggtattatttcgcaacatgatttttaatgattgtatccgctcatctgagtgcatccaagatactgagggaaatttaaataccaggtttcatggtgtgtgtatatgctattatataagtaatataccgtaacccatcttacatttttgctctctctctagattgttaggaatggcttgttcctgagaataaatttaagatgagcgctgggaagtgcttgcctgctgtatgaccagctctctgtcactgccactcagggagtcgcacacctccatgcccaattgtccttgttttttctcatccagttctgggccctggtgcagatctctggctgcccgcctgtctacccaaaaaaccctgggggatatatcgacctctcacactgagtctctgctgctgtgcctacttcctcccgtgtggtgtcgcctctggccctcccggccctcctcctcccatgtcagcgttgtctccagccctcccagccctcttcctcctcctcccgtgtcggtgtcatctccggccctcccggccctcctcctcccatcgtccccggccctcccagtcctcttcctcccgtgtcagtgtcgcctctggccctcccagtcctctcttctgtaataggtgatcactgaccatcatgaggcctcgggatctccactcacctccaccttggccgtgcgtctgcagctggtttctgcctccccactgggagtggggctcatctccaacagctgcctgctcctccctcctcctcctcctgcctgctggcacatcccttttctgtggtccttccctcttcaactgaccagtcccctcttcccccagcccccgtcctcctgatgggcacccttcatcagggttctgccctgtagaaatctctggtttctacttcagatatttatcgagtcttccttcacttctgcctccatctggttagccccttttccttgcttcctttctaccctgtgttgcaaggctccttgatagggatcgccctcctagttatgccacagtatttatagtttcctaccctcatctcatcagaaagctgtccatgtttggctggagaactctgtttcctttaaaaggttgcactgtaagccagtgactcgtagtcatgcgcagagtcaagcacacatcatcagtgtctccaagggttataggaatttacatttttaaaatactctaaatctaaatacaggtcaggtccttcccccattaaatatatttttaagtcatttgctagcagctcacctagttcaaaagacataatcagaagtgcaccataatccagaattcatactgcaattagggaagaaaataatgagtagttattagttgttacacttcaattaaggaaggaaaaaggaaaagaagctgtctcttctcatttggaaggcttttctgtgccacatggtgccccagttaagaaaagctaccaactggaatcccaaagatggaaatgcagcgtgcatcttccctgctccctcagcacccccaatgtgtgtttggtatttccttcagagagagaaacacaagctgaaccctaacagaaaccagcaagtaaatgtgagaaaagtcagaacaagaaaagaagagtgggagagaaggaaaatgggcattgagtttatgagtgacgcaaagaaactggagcaggcagggagcgccaaagaggacagagtgcccagcgggtttgttgttttgctttctttgggttcccagactcagactgcccctgcttctgccgccatgagaggatgtacagcccctcctggccacatgtcctgtaacctgagccaggagcgtgtgactgtcttactaacgcccacggcactgccgggctgccacacttgggtccttcctctcctcctgagggcttagcaggaatcccgtccctgcaccccatgtctcagctctgctccactaatccaagatccctttcctttcggagtttcacacccagtttgtgtgcaaagaaaactatggaaagaaggcctttccatagtgcaccgcattgctttctgccctttttgttaagtacatttcttctgtttaagaaaaatatgattcactctactgcattctcgatttcttttcctgttcttactgttaatatttatccagttaacctgccattttatattttctaattatatgctgtcagtttcattgccactgaaatcttctgtcttatatcctgtttctaaatggaatggtttctttcatagccttcttagagaaaacgtatgctgaaatactgtgaaaaggaggctctgctgtttcctgcttgccggtctgtctgacttattcacttcaaagctgtgaatctgaatccatgtaacactggggcttgctgccgacttataataattatgttgttgcttggaatctctcacggggctatacctagttgatagtaaagcaaattaatgtctgatttttgtgtattagcaatgttattattcaaatacatccatgtgcctgttagccgacaatttttaaattaatttaaatttctcccacctcttgttttcaaatgccaggtcacatgcatcggacgttacggattactcttacccggctactcccaaccattctctgcacccccagcctgtgaccccttcctatgcagctggtgacgtgccaccacacgggcctgcaagccaggctgcggagcatgagtaccggcccccatctgcctcggcgaggcacatggccctcaacagacctcagcagccgccccccccgcctccccctcaggccccagaggggtcccaggcctctgcaccgatggctccagcagactacgggtaactcagcatgccttgtaccctaatccctcctggccttgcatttgaatcttgctctatgtggtaggagaattttaactccggtattttagaggccaagatagagtcaaggatgactggatgtagatactagcaactctaacattctgtgtgaaataaagcaggtgcagcataagctcagacttacagttgagtctcaggccacactgtgcatgcatgtgtgttccctcacacacactctgggtgtttgaatggctctttaagccaaggcattgataaagggtattaagtgctgattttgtgaacctgtcccaaaccctcaagtttctggacacatcctgagtggaccacagaaaattgttatcacagacgagaagaccacaccatgcagctcctgtgcctcatttctcagacttgaccaaaatctgctttcgtgacctctgaccacccagacatcattctgccccaggccctcctgttccctgagaagtagaattcagagacttcatgttcaggcgtttatcaatttaggcacccacctctcttttttttggctttactctagtctttaaagacttcattcctcagagttggtgcccaggaaaattaccgtgtgttggtgtccactgctaacacgtgtctgcacacccctgtctgaatgacaatcctgctctcagaagtgctctccctggccatgcatgccaagtcaggatccccagagtggcttgaggctgtgtcaggccaagagagggcccatggtccagttagtttggaagaccctcggctgaatagaattcagcagatttcttggctgtgtgacttttcgaagcttttgatacacacctgggcactgcaggcatggggcatttccacggaggtgggttagagaatgtagaaagctcccaatctggttgaccttaggacccttaaaagacaagtttgtgagctaccgccttgagatcccagtgtgaagccttcactggcgctgccgtcctggcctctgcagtcagctgctttattctgcctttcttcaggaagtgctgcactttttgagtggtcctccttttggcacatttcagtagcagatcttgacttctgtcataatgaataatgtcaaactgtgaaaataactgacccaaggtgtgcatgtttgcatcctgccatgattgaagttcaggtgacaatacgtgttgtgtctggggatggctccgttaggtgtctaagagctcccaggacgtgaccctctcttgttcccttggtgactatgtgcctcatatctctctcaggatgctcccagcgcagataattgagtattacaacccatccggaccacctcctccgccacctcctcctgtgattccctcagcacaaactgccttcgtcagccctctccagatgcccatgcagcccccgttccctgcatcagccagctccacgcacgcagctcctcctcacccaccctccaccgggctcctggtcacagccccgccacccccgggcccaccacctcccccgccaggccctcctggtcccgggtcttctctttcgtcctccccaatgcatggccccccagtagctgaggcgaagcggcaagagcctgcacagccaccaatcagtgatgctcgaagcgacctcctcgctgctattcgaatgggtaagtggagcccccagacacacagcctgcctttcagcaagaggtttcttcatgtctccagccagctacagcctccttgtcttcaaatgactactcactacgttttttaaaatagagttaaaggggtcttacttgatttttttgttttgttttgaatagtagttgtgtttttgtccagtgtaaggtaatcaaattgtgataaagattgggaaacagccgggcgcggtgggctcatgcctgtaatcccagcactttgggaggccaaggcagttggattgcttgagcccaggagtttgagagcagcctgggcaacatggcaaaactctatccctacaaaaaatgcaaaaaaaaattagctgagcatgttggcctgagcctgtagtcccagctactcaggaggctgaggtgggaggattgcttgagtgtgggaggtcaaggctgcagtgagccgtggtcacgcccctgcactccagcctaggcgacagagcgagacccgtctcaaaaaaaaaaaaagaattgaaattaggaagtttttacttaccttgaaaccagaaacccaataactgaagtgatcgattaattaattggatctcttctctgcattctgctctaaggggaaaagtataaatgaaagaaagtgagctcatattaatgatttctttaaaaaaaaaaaagagtttgtgctggacttgtcatatttgcttgatgtcctaagccagtggtttttcagaatctataatattcaacagcataacccttttgtcagatgaaagtcccgcgttgaccccctgaccacaaaacacatggaaacagagcatctcaggtggaattgggtggggagtctgccctcgcctgtcttgggctgcccagagagcccctgggaacctccagcccacaccatggattcttaaccaggtcccaacccaggttggtcgagggtccctgacatgttatgggaatatccaagagcttctcgcctgtggggagctgcacagacttggtcacagtttagtcatctcatctggaagtgaccaagcaaggagcctggctgcagcccgccagctcagcatcagggatgtccttcagaggagctgtgatgctgctgcctctgcgtttttcttgtgtgcccatgaaccaggcccacagtgtggcccacgcacccttctaaagaccccagggtcctctgtgtacctggacatcattgacacacttttattttgtcaagataaaaaagtcctagaggtatattagctcatgaatatcaagttcggggtcattgtaggacggtgttggatttgccttttttttttttaacaccttataagccctgtctaccaagagtagatacataatctgtatctaatctcgaggaaacatctgatacacccaaatcgacagacattctgcaaaatagcttcctatattcttcaaaaacgagaaggttgtaaaacacaaagactgtgaagaactatccagattaaaggacattaacaaaattgacaaccaatgtcacggataatttccactggattctgaaccaggggataatcttttccatttgcaattagattgggtctttttgcaaaatttgaataatatttgtaggatagatagtagtagtgtatccaaactaattttgtgattttgatattttgggtgggcgaggcgggggcggtaacacatgaactattttaggggtaaagggacattatatgccattcactctcaaatggtccagagaaaagtgtctgtgtctgtctgtgtaaagatgataggggaagattgggaaataaatgtggtcagatgttagcagttggggaatccaagtatatgggaatgtttttctgctggtctcatagctgttctgtaaatctgaaattatttcaaaacagttaaaaaatgaatggataccatcttgggcaacattgcaagactctatctctacaaaaaagaaaatacaaaatttaaccgtgcatggtggcgtgcgccggtggttccagctactcaggaggctgaggtgggaggattgcttgagcccaggaggtcgaggctgcagtgagccatgatcgtaacactgcactccagcctgggtcacagagtgagacccaatctcaaaaaaaaaaaaaaaaatggataaacattaaatcatcaaatatcttactttgttactaagctagaaagtagatgattgtattttatgtttgtttccacagtaattgttgaaataaaggtttctcagttacttcttgggttagctgagagtgagtagcatagaacactgtttccaaggctctggatgctgttgctgcctagtagatgtcctgtggtgatagaaatgctccagcctgcagcgtcccagagagtagccactagccacatgtcagttcatgcttttaaggctatatgtgcctagtggctgctgtctgggatggtgcagctccacagttttctctaatggtgttcaggtacactgaaattaggaatttttaatattttaacacattactttgttacaaaaaaacttctcactttgaatgcatgttttttctcatgaaacttttaatattccctgagcttttctcccctcaaatttctaaaactttctgtccttagtgtcagtagaaaaaaaagtccaatagacatatttgttcgtttatctttaatttggagccagcaaaaggatgtgattctgaaccacgtgttgtgtctgcaggaattcaactgaaaaaggtgcaggagcagcgggagcaggaggccaagcgggagccagtggggaatgacgtggccacgatcctgtcccggcgcattgccgtggagtacagcgactctgacgacgactcagagttcgacgagaacgactggtccgactgagcaaaggccggcggagaggccgcgtgtgggagcgtgttgaagattttaagtggtctctacacccaaatagtggtattctaatcccgtagcatagcaccttttgtataaacaatgtgatattgcttctgcacatccaaaaattctgggtcttttcagtatttactgtgtaatacttaagtgccactaaacatagcaaattgtgctgcacatgaggaaataggctgtcactatcacattgtcctgaaaacagcatctgctttcctcttggccatgagagtatttagtgcagtttgggtttactcttactgatcaatataactctgcagacttgctgtgtgtttgtgaagctgcctggtgttaggtctctgcaagactaatgactatgtcagagtgatgtcttccaaccagtaagtgatattgtttcaccgctttggtttttccttttgtttttttaaaggatgtgtttctgaataagttggttttagagggaaaggttcaacaaacagggagaatccagtgtttctgctttcagtttcttggcttggtagcctctgagtgaatctgatgctctgctgaataatttcattacctctgcacatgcctgtcaaatatgaaattggaagggcccttttcaggctgggttccctgtgggcatttgcttagtaaatgcctgttgatggtttttgcaagagaattcagcagctcaacagtaatgaaagtgaagaacagagtccattttccttcctggggccattggggatgacactcaagatacttgccagtctctccagtgtgggcaccagccggccagaacagatgcgagcagtccatgactctgggagctacaccgctgagctgggcagagctgcggcacagggcctgggctgcaaaggagccctgctcctttagtttcctgacacctgtgtcctgagtgagccgcaggagttcttagctcctcagcgagcaacagagagcactttagatggcacctttcaccacttggtcagaattttaaaagcttaggtttaggtgaaagtagatattgacagctattcacctttcacggtgctggggccagattagggatcactcccgtgaggagggccttcaccctgttctagaagcacatggttgtcctcctgttgttggcacattaaatgataaaaagcacctcatgagattcccttgatcagccctgcagctgtagtacagtgctgtgccctcacctccacccttcctgttgttcccacgtgggcaataccagggacccatggggaaactcaagaatgacagcttctatattttgtaattctggatgaaagataactgtgttgaacaaacaggtgctccaggctttgattatagatacgacttcaaaaatatgctaagacgcttgacttattaaggactttaacctactcaacagtatttcatatccattgtggttagttactcagttatgttgagaagaatctggagctaaaagcagagatgtttgaggtgacggtaggaatgtgagcaggatggtgatgggggtttttgttaaaatgcatctgagcaagtcagccagccccgaagtcccctcagtgtgtgtgtctcgagtggctacctgttgggcttgtgggcagtgattgtacagagcctgtccattgggtgcagtcatgtagatctgaagccctgaaaagcctcatgtctgcatcccctttccaaggctgcttccctggtgtgtctgttctctcctctgtcccaggtgctgggagcgtcctcttcagcgtcttttcctagagctggtcaccactaggctgtcactataaattccttgaatataagtaacagttattaatgaacttctaaatttctaatttctctctctctctcttttttttttttttgttgttgttaaaaagggcctactacattggcgctattcttaggacttctgcaacttttaaagtcttacttgtctttcttgttgcttttgtattaggagttccccgtgtgggtctagaactcccctttggtaatgcttctttgtttttttatggcccttctgttctcaggatggagagaacacagaagctactatccatgtcaggatttattctatttatatcttattacaataaaattagtggcactttattcataaatattcatgagcctgttaattgttagttgtcttcctgtagctgaatcaacaagttattttcaactcaattttatgacttgcgaaaaagcttttgccctgttgtgtaccataacatttaaaagaatggaaaatgactgaaatccaatttagattatttttagagtatttttccagcaaattcaatttattctgaaatttaaatccagatcttttctaatatggtattacaatgaaaagaataaagagaagatttgaattttcagtttcattttcaaaaactatttaccaaaacaaatggagaagaaacatccaaaagcacatttcatttctccaaactttgtgttttaaattatagttataaattgtaaggtaattttaaattgtccctcgtattatttctccacgtctgttttagtttaatgtctcctaagcttttctctcatagcgtagacctagggaagggatgggaagattgcccagtccccgatggctgcgcacacaggaggcggcggagcacaaggcaagtgagtttgcactgtcagccccagaccgtaagcttggctacactgatgtttttctttactaaggatactattcaaaaattaacattttcatctcagtaagtttttagaacatcaaaatgttttctgagctccaagtggctaggttgtaaaagttttataataatttgcaattaaaatacatgatacatattaatccattaaagactagtgggaatgtatcagccagagtagcaagtaatttttgttttataaatcatagtatctgtcatcttgcagtattaccaatgctgttgtaaattgaatttaaagtggtattaaaaaaaactgttaaacaatttttatctgtttgtatatcttactatagattatgtacaagtaacatctaaataaaattacacttttaaccctaagaggttttgcttattaataa

SEQ ID NO: 221 - DNA, 70187 bp, Homo sapiens
ctctaggccacaatgtccaagtacctgggacagggtctggcttaccaacatggtacaggacggcacttttaaaaccagggactcgacttggacgtgcgagtcaacaaggtacaggacacatttctctccggggaaatcttgtgtgggcgccgaggcccggacgtagcaaccaaacgtcgggaagaggcgccaaaaggatgctgggcctggctccttgaagcccgggttttcccttttgagagccacaaccaagaaataaaaatctagcaaagagggggccactttctgcggcgagatacgccctctcggccgctcctccagctcccaggccccctccctactcgacggtgagcagcgccgcggcccgtgcagccagacgcgcggggtgcggcggggccccgggggccggggtgggggaggcggagggtgggcccgcggtcacgtgagtcgggccagctgctgcggggggcggcgggccccagcgccgggagtctgggtagggggaagcgcccggcggccgcctccgccactgcagctgcagcccccgaggtcgccgcagtaatccggacccggcagcacccgcaccctcggcggccgcagcctcagcaccgcagagcggagagcggagcccggagcccgccgccccaggtgagccgcgtctgggagcgcagggcgtttgcagcgctgctttcccggcggtttcaccccacccgccatcgccacctcctgcgtttcatctcctcccgctgtccctccgaacccgcgggtagcgttaccccaggccgattcccggtgctggcccgggcgggctgggagcctgggggcggtcagaggagaggtggcctcggcctgaagccggggtgactcggctcggggactgcgggggtgcagtggagggatgccggccccgggctcccgcaccgcagccgggttccccgcgctgctcttcctgggtttccttttcctggcagccaacctgctgcccactgggatgtgcctgtgggcccctggcctcgccaccctggggtctggggcgagccgggcaccttccccgaggtgccgtacctgctgcgcgggcgggcgccgcgaacatggctgcccggagacgcccgccgccttcggcccggctctgccagcgcgtccaactcgcccgcggccgccgcaccgtgtcccggagcagccctccccgctaggccgacgcgcgcgggccgcccctgggttctccgcgggccgcgcgtgggacttgacacaacttccctcgagccgcacccgggcgttctccgcggggcgccgggcggggctgccgagaggccggcttggtcggcctctgcctcctcggctcgctcttgaggcgtcgagtatttggcgacctcactcgcgagggccgagagaaatgtggtctgcaaagcaggaggggcgcttgaactttagagaattggcgagaactcggatttgggaataaaaatgtccatgaaaacatcgaaggaaactgttacctgctttgactcaaagctgaccttgtagggttctgttaaataacgtggcttttctggattttctgtctgattctagcatgcaagtccttgacttacgcttgcgtccggcagccgggtggggtgggtgcgtgcgtgtgtgtgtgcgcgtgtgcgcgtgttgtgttcccagcctggttagaagatgcatcagttgcggaggaaacctatgctaattcaaaatggcagcatgaaaaataggccaggcggaagcagcacagaccacaaccatcagctgccccctgacttaagcctcagggagggaattagtgtgagtcaaggctcatccgggtatggagtagagagtgattcttggagctggctagattttagggtgctgcagggtcctgggagttgttaagtgggaagtttggagagctgtaattatttttcctaacttatcaaaagatgatacaaaacctagttaaaactctacggttttgtatgattttctccaggctcaactaaagttgactctgtggctgctgatgtctttttgatgcacaacctggaggtcgtttgatacctacaagctcttaaaagagatgtgtgcacattgtaaacatcatccaagagcagtgcacataacaaataccaggttcttagatcaagtttcattggaagaactgatttagcgacacgaggaagcacccaggcatgaggaaatgggaaattcttgaaaggtgactcattttagaattttttttttttaaacagcctttctttcccttttcacttccgtgctgccagccatcttgtcttttgggaaggagatacatgaggaggcaaatgcttcagggataatggaatagaggaggatgagctaaggtcggggggcagaggtggaggcagtcttaaggagcctgctgtcaaccccctttttacagcaggaaggctgaggccagcggggcgaatggacgccaagatcatatatctggctgtcaactggcagtgagaacccaaatccaggtctcataactcccccgggttccacatgctaccttttagagcctgggggagaacagcaagtctgtcattattaggaaggcaaacacttcgagcaatgggaagccaaactgtaatatgaattacaaagtctataggtgtttaaagtcaatgacaacaccttaatttcctaattcaagacttttaacttcttaagctgtatctacctcatgttcacattttccagtggtgaaactgtttctatagttaagaaccaaaaacattattttagtaaagtctttgaggcaagaagtacattttttgattaaaaattgagttgcttgtgtttgtggagaaccattaggccagtttattttgaaaaggaaccaaagtaggccatgcatttcatttttttcgactgtttctaattttaagtaaaagtaaataacaagcctattgtaaacataactttgaagcagtgaagacaggcttttcctatgatttgcatttgacttttctgagtcatgagtcagtgaccttagatctactaaagcagagctagaaattgtgcatgggttagtgtgaagaggtggtgaagatgtggaaaacgtttcttctgggcatctgaaccttcacagccagtgatgtgcagagggagaaggtggcaggaggcagggaacagggagaatgtcttgaggcagtggaacagataggagctaaatatgaatatatatatcgaagtgaagacagatgctgatgtgacatgtgccatttagaaaactaacttgcagccgggcgcggtggctcacgcctgtaatcccagcactttgggaggccgaggcgggcggatcacgaggtcaggagatcgagaccatcctggctaacacggtgaaaccccgtctctactaaaaatacaaaaaattagccgggcatggtggcacgcgcctgtagtcccagctacttgggaggctgaggcaggagaatcgcttgaacccgggaggcggaggttgcagtgaggcgagatggtgccactgcactccagcctgggcgacagagcgagactccgtctcaaaaaaaaaaaaaaaaaaaaaaaaattaaaaaaattagaaaactaacttgcattagaggatgaatgtgaagatatgccaaagatatttaaaatagcaagttgtaaaaatacagaaatgcatgcaatttgtgtctgttgaagaataagaatacagataaacaaaagttatttttttttaaatccgttttcattagagtctagatctgtgctgtttcatctggtagccaccagcctcatgtggctattgagcacttgaaatgcagctagtttgtattgagatatgctgagtgtaaaatatacacacaatttcaaaaatttaatatgaagaaagaatttaaaatatcattaataattttatattgattttatattgaagtaacatgttggatatattgggtaaaatatattactaaaaataattccatgagtttctctttacttttaaaaatgtggctactagaaaatataaaattgcaaatatggttcgcatctgtcttgctctctctcgagacagggcctccctccgtcacccaggctagagtgcagtggcacgatctcggctcactgcaacctctgcctccagggttcaagcgattctcctgcctcaacctcctgagtagctgggattacaggcgtgcgccaccacagcccggctaacttttgtatttttagtagagacagggtttcaccatattggtcgggctggtctcgaactcctgacctcaggtgatctgcccgcctcggcctcccaaagtgctgggattacaggcatgagccacctcgcccagcccttggattatatttctagtggtttttaacaggaactggagggtggctgagctcataatgctgtttgtagaactgggtatgtaaggagaagttaaaacagaaactgaaaaggggacaggatggacggaaaagggactacaagaagtgagtgaccagggaaactgtaaagggagagaaggagtatgtggtgggctgggactgctgagtatgagactatgaagcagaataagcacactacgtggtgatctaggacatggggacagtggagtgtcagggtctatggtggtgggacttcagctaggatggagaaatagcatggctaacataactgcacagtgcattggaaagtaacttcctcattctgacacatctgtgttcccatatcgaaatgagatgaatacaccccagtacagtgagagggccctgggctgcaagttaggggacctgggacctagctctggtcccacctctaattaggagtttggccttgagcacaccacttatcagtctccttccttttatttttatttttatttatttattttttgagacagagtctcactctgtcacccaggctggagtgtagtggcgtgatctcagctcactgcaacctctgtccccccaggttcaagtgatttctcctgctttagtctcctgagtagctgggattacaggtgcgcaccaccatgcctggctaatttttgtattttttagtagagacggggtttcaccatgttggtcaggctcgtctcaaactcctgacctcatgatccgcctgcctcagtctcccaagtgctgggattacaggtgtgagccaccgcgcccagcccagtctccttccttttaggatgagatgaacaagagctgtctaccaacttcactggttatgttaatctgttagatttggccaaattacccaaagctactttccccacacaagtcaagactagatattatcaaatttttaaatctttgttcaccttatatatttaattggctccttattttaatttgtaattctttttttttttttttgagacagagtctagctctgtcacccaggctggagtacagtggtgctatctcggctcactgcaacctctgccccaggttcaagcgattctcctgtcccaaccttctgagcagctgggattacaggcgtctgccaccacgcccagctaatttttgtatttttagtagaggcggggtttcaccatgttggccaggctggtctcgagctcctgacctcaagacctcggcttcccaaagtgctgggattacaggtgtgagccaccacgcctggccctttaatttgtaattctctaattgtgagtgagataaatattttctagtaaatattttggctatttataattgttcttcttttaactggtgcttatatattttgcatatttttcctttgaggtggtcatctttttcttattggtatgtaagagctctacatatattaagggaaattatctctttttcatgtatttcctagtttctcattaaaaaaactttgcctcacaagaaattttaagttattttataatcgagtctatattttccttgttgaattgagtttatgtttttgcttgctaatgttatttaaaaaatttatccatatgatttgtatttttgtggttttaattgtaaaaatttaaaattctaaattataataatttattttggcttaggagtgaattggggatctcaacagatttctttttttttttttttttttttggagactgtctcactctgtcgcccaggctggagtgcagtggtgcaatcttggctcattgcaagctctacctcctgggttcaagtgattcttgtgcctcagcctcctgagtagcttggctcacaggtgagcgccaccacgcccgactgatttttgtatttttagtagagataaggtaatgccatgctggccaggctacttttgaactcgtggcctcaagggatccaaccacctcagactcccaaagtgctgggattacaggcatgagccactgcgcctggccaatctcaacagatttcattcttcctttccccatcctgttatagtcagttattctggcaacacttattcatctcagtttcaaattcagtcttcatcatatgctaatttcctacattatatggctatatttcaggactttctacttctgattctatcagtaacaaactatcttaatactggaactttataatatagtttaattccatgcaagtctagtatttcctcattaattttcatttctgaaacttggctaatcccacatatcctttgcagatggacctcaagatcattttttgtcagattttctccaaaagccctatttatatgttgatagctgtcatattgactccacagattaatttagggagggctgacttttttacataacactgaatctttctagcaaagaacaggaacattctctgttctttaaatcttctgccatgtcaccataaagtcttttttttttttaattatacttcaagttttagggtacatgtgcacattgtgcaggttagttacatatgtatacatgtgccatgccggtgcgctgcacccaccaactcgtcatctagcattaggtatatctcccaatgctatccctcccccctccccccaccccaccacagtccccaccataaagtcttaagagttttcttcattgaggatttgtgcatctctctctctagtaaactgacataaaatggcagaatccctgtaaagaaaactatagaactctaatgatgaacttaaaaaaaaagctcacaccaaagaagagacacttcttgggccaggtgtgatggctcatgcctgtaatcccagcactttgggaggccgaggtgggcggatcacgaggtcaggagttcgagaccagcctggccaacatggtgaaaccacgtctctactaaaaatacaaaaattagctgggcatggaggtgcatgcctgtaatcccagctacttgggaggctgaggcaagagaattgcttgaacccgggaggtggagattgtggtgagctgagatcaccattgcattccagcctgggcaacagggcgagaatccgtctcaaaaaaaaaaaatgaagagacacttcttgcccttgattgagaagatagagtcagggcagcctggtgtttaagagcattttggagtctgaatttttactccactacgtattaattatacaaccctgggcaaagtacttcaccacttcaccattctttttttttttttttttttttttgagacagggtctcgctctgttgtccaggctgcagtgcagtggcatagtcatgggtcactggagccttgaccgcccaggctcaagcagtcctctcacctcagccttctgagtagctgggaccacaagtgtacaccactacacctgactaatttatttttatttttttgtagagatagggtctccttgggttgcccagaatggtcttgaactcctggacccaactgatcctgctgtctcagcctcccaaactactgtgattacaggcatgggctatagcacctggccacttcaccatttgtagctttcattttctcagctgtaaaatggacataatacgtgtgtgatgggttattgtgaggattaagtgattacacacacacatatatgtatatgtatgacttagcatgttattaagcacatggtgaatgcttaatgttctaacatacaattttagatgttatgattgtgattattttagctacccctgtcaaatgaatctgtaaattcagtataattccaatcacagacccagaggaacactggaaacactttgtcaattttttaaaagtttgacttgggaaacaaaccaatggaagagcccataagtgaggaaaagagtcagtgggagtgagctagagtattgcttgctttatgccagagtatatcaaccacaggcctccaagactttgtgcctagcctgtactagtgacaggcgtgtcctttcccgctattctttgcctcctttctaccctcactcccatacctacccacaatctgagccttctatggaatgttcttctcaacatcgcttaggcatggttatcaggctctcataggtggaagggatggcaaagaccacatactctcattcatgaatttttttgtgataggtgaggttctttatgtccaagaaggtaagaagtgatgtatatgttagtcatttctagctgtcctcccttcctcagaagctcccagtgtcatcagggccctcacccaatcttgtatggggctgaagggaactgggtggaatgtcagttcactcagtcaggctagtagatagagagcctggggcctcccaacttgaacttcacctgaagctgggagaaggagcttgagatggttcatgatctcttcttctgttcttaatgattatgtatttaacctaaatctccaagtgcttaatttactcccctgtcagctaggcatgtttgaaagctctcataaacatttctgatcaatatcctaagttgggttactaactttctctcttggttgtgttcatagacagctcttccaaatgataaaaaccttgagacatcttagctctgttttccctgcagttgaacatagtgcttgtaggtggttaggggctcaaaatatattttagtaactcatctgacttaaaaatcctaactaaaattatgtagtgatcaaaagctttcctgagtatctttttcacctctttcttaaggtaaagctttagtgtatttttttttttttattgcacttagcagtgccttagtgacctggaagaattaatgaaatgtcttaaagtgttcttcttaagcactgaaatgatcagattttagaaaataattaaaagaccaataaagcaatatgagcttgctgtaaagaattttaaaactatataactagatgaagtaaaatttaaagtttctatctccctatccccatctttactcgcactctcaactcccagttagatattaatccttctaggtcttttaaaatctatctatccatccatctatgtgcctatctttctatctacctacctatacttatatttacataaatgtatatgcacgcatatataggtatatacatatacataatcatgtattcatatatgtgtatatattcctttttgataataaaatgttttaaatttgataatgataaaacacaacaagtagctctagaattaatggacattattaatggacttttacaaagtagttttaaattccactttgccagacataaagtaaccctttgtttttggaccagcaagatttacatcttattaccttatttcttctgtagaaaatgaatgtttggctaattttttagtgatggagagttaaatggctaacgaccattttaaggatgattgggaaaattttttttaaatcccagtttacagagttaacaaagtacatatcaaatcacattaatgggaaaagatcagaatacacaatgcactgttttgatgggagaggaagacagatggtgggaataggaaggtcataattcaaagcaaccttgccaaattagtggacacaatggcagcaatgtcaaaaataagaacagaaggaaatgaaaggacctgagatgtggcttgctcagtacctccctatttcccacagagaatgcttttggcagctcaccacagcctgcctatttcaaacacatccttcatcctttatgtccatcatcattacatccctgttctttatgatcaagttaaaggaacaaacctttcttgaatttatctctattcctgacactctacatatattatctcatgtaatcctcataactgtacatggttgacatggccccattttacagataaggagcttagtaagtagaggagcatcacctggaatctgggtctatctgacttttttaaaaagccataatataacctcttagagtaattatcctgactgcataggtctagcctgtagggataatcttatgtaaatcgttttcttcctttctttatatttctatgaaagaaggaaaattgttttccaacctgccatgtataggaaaacgtctttcttacagtgaacttgatctgactatatttttctaatttggctagcttaagtgaaaatgaatcctacataagttatctgttccttaatgcattttaaaaaaatgtatccaagaacagatgccattccattaatctctcctctttccttcacttacaaaatccctaaaagagttcttacatgatagatgtgcatgaagactgcatttttaaaaagtgggatcatattttgaatgcacagcggggtggatagagaatcactgggtatggaggagttcttgcaggtggtccttgaattcaagtgtgtcccaacattgaatgggcacggcgtaatgagacatgtatctacactattatttttcaactatgtaaggattctattgtcattgcgtacctacagattcattaaaggtgttactaaattcataacatatattcattacatattttccccagcaaattacaaggactgttatgtggaaatgttcatgaatttttttttctttttctttttgagatggaatcccactctgtcatctaggctggagtgcagtggcgtgatctcggctcactgcaacccctgcctcctgggttcaagcgattctcctgcctcagcctcctgagtagctgggattacaggcacgtgccaccacgcctggctaatttttgtatttttagtagagacagggtttcaccatgttggtcaggctggtctcgaactcctgaccttgtgacccgcccgcctcagcctcccaaagtgctgggattacaggcgtcagccaccacacccggcggaaaatttttgacataaaaaaattgggaaacatcatataaaaatattttgcattatagataaattctgaagtgacttgaagaatacttttgtaaaatgattagttacctatgaataaatgtaggttttgaagcacaacattccgttgaactctatatttccctagttactaatctgccacatgaatcacgacaataaattagacattttgctttaattcatatttctcattatgactgtatcttgcaaatgaggcaaaatcagatgtggccaaaaggtaaaattagttcatttgccatggctgagctatggggttctcccagagtctccgccttattgcagggccatactttttagctgcaattaattggataacagattactttcatgcaactctttcttttctttttttaaaaaatattttcgttacattcacaacaccatgcgatgttgtgtatggggggttaattccatttgtatatgaggaaactctggctcagagttagagaagtcaggatggctactagggcctggtgtctctaaagtgtgtcattctcttgtacctatacacatggggctgcagggctaggcaggcggtatcagtgagtgcaattacacaaaggtgaggagaggtggcgctttcattggcctccgtgtcagagagtggaggggacaataggaaatacaggccctgttgagaggagccactacccaactccagtcttgccatcatgcgggaatgtggatttggtgttgccagatctttgagtttttagcagaagccaaatatttgagtgtccataggaaatctctggatcttaaaatattagctgctaattcagatttctaaaaacacaatctaatgcagcactctgggccaaaccaaccaaatctgcagtctgtcacccctgttccacaccacgctgctgggaagtatgtcagctgcagactggcactgaagaccacagagttaactgtcagaagtagatattgcctttgaaattggagaaagagactgttaagcagctcttaaaagacatgaagtgacaatgaagcaaatcttcaaaaggtgaaagagcatttagacacttcaaggaaagtttctgaagtctgaacagataggctttgacaaagggaccgctttcatcacgtatccttctcttgttctcacaataattgagtccttgctgtgtcccaaatggtattctgagcactttgtaagtaggtataagcattatctcatttaaatctcactgcaaccctgggaagaatgaactacctatcattatcccttttttataaaagcttggagaagtgacagggctgagatttgaacccaggtgggcttcaaagcctgcttactcacttaatagcccatacagttattcttccattacttggttcctcattcaaggcattgaatattaggagctggaattcactggctgtggagtcccaaagctttatgctctactctcatgagctttcaatgaaacacttagtaaaatctttcttttgggcagagcttgatgagtctgagctaatttatatagatgactttcatcagctggcatttacatcccaatttttaattagctaattcctttcccaaacacttcatttattcctatttcaatagaaggtttaaaacagaaaaaatcaatttgtaaatgagtatcatttgtcctgttttcagttaagcaggaatggcaatcatttaaaaatgaatttattaatgaagagtataataatttctcctttgcttttctggaaggtggtaattcacagtcattgaatttaaatgtattcagtctgctcaataaagctggtagtgtggagaatagggaagtctagctggacatttgggtttcattctttacgtaagtaaaggcagttggtcatcggtacttgcaagacgcttaataaaccgatagcttatatagacagttattttctttctcttaggcagtcaaggctttcttttcaatgggtaaggtaactgatgagggatactgtgtgcatcattgagataaaggtgcagggcagtctggcagtcatgcagaaaaaaaccttgccttggctcagagcattcacgccttcaataactactcactgaacttgaggacaaagaccttttctcccacacagcttcctccctcctcagctacacattctgtatgtggtctcctagttacgagagtacagtactccagtccctcaagcctgaacttgggcctcctgccaccagtcagaggatgaatgctggtacatgcagctcctttgcagtaaactccagggaagcactactatcttgttcccaagaggaagtcatgaatcctgaaagaagtttgataaggaggacagtggtggttagaaactaagcttagggatgctttatcatagccaatggcacagtagctaaagctggatggtctaatatggtagcctctggccacatgtggctctttaattttctaatttttacttctaattgtggtgaaacgcacatagcataaaatttaccatcctaaccatttttaactgtagagttcagaagtgttaaggacatccatattgttgcacaactgatctccagagccttttcatcttgcaaaactgaaatctgtacgcagattgtaaacaacttattcccttctgcccagcccttggcaaccaccattctactttctatttctatgagttttactattctagatgccttatgtaagttttttcgtgactggcttatatcacttagcctaatattggctgtttaacttgaaattaattaaaaatttggttccttcgttgaactagccacatttcaagtaccagatagcccatccggctggtggctactgtattggatggtgcagatagagactatttctatcatctcagaaaatgctcctggacagcgttggtctgaaggaaaactggtggctcgcactgagagctgattggaggggggacaaggagaaaaagtagcagatatttttttatactctgccaacgtgaataatctgacttcttttctctaccacaaaaatgtaccagctacatgatacctttacatttacaacttccatccttatcctaaactccagtctttaatgtctcctctcctccaatagcatgcaacattaaactaatcagttggaaaatacagagaacataaatgtatagtacaaactacagataaatgcactttaaaatactcttaacaaggacttcttaggaaatgcttgtcagcttacccatctatgggagttaaattagagtgtttcattaattagaactgtcagtgtattgctaacctggcaagaatcctaatgggtatttgccacaaagaagccttattcagcagacctgcccttttagcctgttgcttttaagttttttccttaagactcacagtaagaaatgttacatctcaacatagtacctatagacgcttatatgtgcatgtgtatggacctaaacttaaaattagagtttctggcattagtacttacccttactgtatgagatgcatacatgctttctaaaaatgcttttctgaaaaaacttgttcctatccactaaattgatttcataaaccacaaaaaggccacaacatacagttaggaaaacactgttttggatacacccacatccagtttcaggcctatagtgtaacactgaagccccaccgccatttctgggtccccacggctcagaaagcagcttcagaattatgcctcaaacaaggaagttttttaaaaagccatcaattatagctttatttctggacaaactctgttcactgattttaacacccgtttaagtagaatgtagttatgatggaaaaccccatcatcaaatgcttatattctacttttcaaagctgaatataaataagttttctcatgttctaagtttttatattcgtgtatgtgattgagagttaattgaattttaggttctttttttctttttctttgtgaaggagaatatacatttcataacgttgtatgagattataaaggaaaaggagaaaaatcttaaagccagtttcttgtgtcatgcatgaataatttaacagtttttaagaatcatgtagggctgagcacggtggctcatgcctgtaatcccagcactttgggaggccaaggcagacggatcacgatgtcaggagtttgaaaccagcctggccaacatggtgaaaccccatctctactaaaaatacaaaaattagctgggcacggtggtatgcgcctgtaatcccagctactcaggaggctgaggtaggagaattgcttgaacccaggaggtggaggttgcagtaagccaagatcgcgccactgtactccagcctgggcgacagagcaagtctccatctcaaaaaaaaaaaaaaaagaaagaaagaaagaatcgtgtaaacaaatattttaaaatgcatgttttatgtaatatataaatgatgtaacttgtcagttttttttcattttagtgtgaatgtctggtatgttacccaatattttgacagataataggaagagaattgagttcctttgaatcactttccgaagggtttcgtctcaggttcatgagagctctggcttccagactggccagtttttcttttcccatgtggacaactgtaggaggccaactcactatttgtgtgaaacatagtaatgaaacattgtgtgctctctgagcaactctgaattgggcaggtgtaaaaaaggtaaaagaaagtatcagagaacaatgccaaataaaaaaattcatcctagctataactcatataagaatttgccacttttgaaatttcagatgtattaggatatagatgcagaactaaaatttttctttaaaattaaattcctaaattgctattctctcctgggtttactttaaaaatcatttctgggattatatcagtaaaaatacttataggaaagttggaaattagaggaaaagatgaaaaaacaaagaatatttcattgctgggctcccactgttaatattttgaatacatttcctgggcaagtatttgggcatagtctttttctatctatattttaaataagataatttatcttgcccctcaaatcatttcttcatgcaattaaaaactcttcacaaacatatatttaatgggtttatagtattctacccgatagatgtagcagacattttcagccagttctctgatgctggacaagtaagtttcagtttttcgcctgtatgaataccactacgtgaacacttatgcataccccttgcccatattcctgattgtttccttaggatacgtagatagaaatgaaattacttattctattttcatcatttctgtctgctttgtggtttccttcctatcacaggcaacttctttgatattgtctgtatgcaattttcaacctaaaacctgacttaaaagccttcagtgctttactgtgtgttgtgaaatagacactaaagtacttgatgtgaccttcaaggctcagtgtggacctgcccatcatatacccacctctccaggcctctaccctactttccctgtcctcagttgcatcagctttttaatttcttggctccgttccttttctccagttgcagggccttcaggcctgcatgtcctttctctgaaacattctccctccattcacctgtcttttgtggaatagaaagtgagacctctgcttagaggaggtggttggagatttgaagaaaagtgaaggtgtcaaaaattcatttaggaaatagaggaattggccagacaagtacacaaaggattcccagatagtaatgagggccactctcatggtgttttcagagtcaggatatgagattcgcaccaagagaagtgtaattggcatctacagctatgattacctttaacttatgtaatctaagtcagcctggtgagttttgtagctgcttcctaaagtttgttttcttcagtcttccggaagtgtcccacctcctctttgctaattcagtttatatggatgatagcacattttgtccttagaataagaggacttcacaaacaagaacttctgagatcactggaagccttaatatgaaaatcttcatttctgggtttctttgggactctgtgtcactgtcccgtccaatggagtttctactagctacatgtggctatttaaatgaaaattaatttacgttttgaataaaatggaaaactgtgctccttcatcagtctaactacacttcaatagctgcctgaggctagtggtcaccatattgaatggtggacatacaacatttccatcattgtagaaaattcttttggaattttctacagaaaattttcttttcagaaaagtcatctctgaagctagtcagtgcacacatggtgattcaggaaaaattaatggactgttagcctgggctagtttgctcctaggtctgatgcacactttgctggttcatctagctttttaattcttaaaacagactttgaaattctgctccctgctggcattcccagtcattcacaaaatttagtggaaaagccagcctcccttggcccacatacccctgggcttctgttgcctatatcctcatcatgatcatgcgacccagattatttgctgactaagcaggtgccttggccaaacaataggtgcttgcccaaaaccccatgggttttatttatattctatagataaatctcataaatgcaaaattggtggatttctaccatttttaaggatcaaataaagtaaggttctgctcctaggcaagacactagctcttttgaaatggcccagtgatggggagagagggagcatatgagatactcgaggcatcacacaagataaatgcatcctttccccatcttatcttcctctgggtctgtttcactttatttgtctccagcaattcccccgatgcccagattctagtagcactctataaaggcatttgatttcataattattctaggtctttcttgtgcatacacattctttgtttatctctctctactcctccagtctgaagataaagccgtttttgtgaaaatgggaaaggttaaggggagaaagaactggagcctctttatctttctggcttttcttcccagagggaaggggtgatgttctactgagctagaagggaattattttcagaattgtgggggctcctccatttctctgcactctggggaggggcctgccataaacaatgcagggaagaactctgagtgtgcatgtagaaattaacctgaagtagattggatatagaaatagcaatacagtcccatacaaagaggtttctaaacatagaatattgatgactctgcaatttggtaactgctctaattaggaatgaggcaagtagattttgattggtttgcttaatagaaaattttagatattgctctattttaacagtcaaaacccaaataaagttttttttttttttttttgagacagggtctcactctttgcccaggctgagagtgcagtggcgtgatctcggctcactgcagcctcagcctctccgggctcaaatgatcctccctcctcagcctcccaagtagctgggactacaggtgcatgtcaccacacccggctagtttttgtattttttgtggaaacagggtctctccatgttgtccaggctggtctcaaacttccaggctcaagtgatctgcctgccttggcctcccaaagtgctgggattacaggcatgagccaccacacccagccagcaaataaagtatcctatacttatgcatcctccacagtttgcaaaacatgttctcaaggatcattttatttgatactctgataaacctgtgggctgtggcaaaacatttgcaagagggaaacctaggctcagagaggtaaagtgacttaagcaggtcacacagctagtaggtggtggagctgagttttgaatcccattcttgtgcttttctgaaaagattgctgtacttctcacttatatttcagacttgtaaaataaaacacatggaagttggataattgatgacacaaatacaatagttggtacactagataatgtttcttgagtgcctgtaatgccaggggttggggaaagggctactatggttggatggcatcagtcctgccttcagggagctttctttgaaacaggtaaagaaatatacaagcaacatatgtacattattttataacaaaatggatgtattagtacctgtgggtggtgaataaatgagagtcctttatagaagtctttatgaaagaaagggttttgaatcagatcctgaaggatatgtacaaagactaagggcagggcattcaagccaggtgcagaggcatggcgggagaaaagagagatattagagagtcagcttcagtatggtggactattaataaacaagaaaagaacccttgtttatcactcatttaaaatctactctgcataagacatagtgtacggctgcggttacagcagtgtgcaaaagggaaaggtccttgctttcatattgcttagattttgctgggagagactaaataatgattgttggtaataaaataatcaaacaagtatttcagattatgataattactttgaaggaaaaggacaggattctatgagagtgtatagtacagcaacacacattagagtactagagtgatatttgagctggtacatgaaagaggaggagttaaccaggcagattgttttggtacaggaagcagggaagggagtggtgaggacaaaggatggagcatgtgcagaggtctggcaggcactggaggagctagaaaaaggcctgtgtgccggcattgtgagagtggaggggtgagtggtagaagatggggctgggaaggggaaacaaacttgatcatattttggtctttattccaagagccttgggaaactgctgaagtattttaagcaggaatggtgtgatcaaatcttccttctaaaaggatcactttggctgcaatgcagagaatgttttggagtggggagtgatagaggttttggagcaacccctccggaagttattgtagtggtccaggctggagatggtggtggcttggtgcagggtggtggcagtggaggtggagaggagtgggaggtttccatagagatttaggagatggaatgtacaggacttggtgatatattagataatggagaagcaaatggcaaggatggttaccttggctaccaagataaagaaccttgaaaagggaagaagatgaaatcagcttcggatatcaggcaggcagctgggtctgtgggtcagaggcttaaggtgagaacccagctggaattaaatgtgtaagtcatcagcatgtaactgacaagggaaactctgagcatggatgcattttcccagatagaaaagatcattaaatgaggaaagaaggatgaagcagtgaggatgtgcactggccaggtagaacaagccagtccaggagcagctggggaggtggacggaaaaccaaaaggtgtttgagtgttatgtcatcgaggtggagtaaaactactaaaaacaacaaagcagggtatctgtcaattgatctgtagacccatttcctcatcacaccccaaatctgttatgtggtggctatgcatttctggatctgaggcatttgtgtagttagttttaaggtatgtttatttattattttattactgtgaacagattgcagtgtgtgtatgtgtggtgtgtgtctgtgtcttctgcctagaacaataacctcctttcctttctcccacatcactgcacttttggctgccgctgtggtttgttgcaaatctgagctcatttaatcccacagagtattaaacaatatctggtctcggtggctctgtcattccactgcaggcgtcccaccttcatttgccagctgggatctcttaatgagctagctgtgcacagttcaatagtaaaacccttttagctggtgaaatatgtttgaagaactcactgttggagtgttccatgtgaggcctgcttccactcttgctggcattctcttttcaggatggctgcagctcctccaagttactgttttgttgccttccctccacgtgctaaggatggtctggtggtatttgggaaaaattcagcccggcccagagatgaagtgcaagaggttgtgtatttctcggctgctgatcacgaaccggagagcaaggttgaggtaagccgtgcattgcagtctcgcgagtcacactctcttttctctggctttgccgctagcacaaccctaacttcttgcttggaagcttgctcacaagtcagagctatcatgtcagttctgctgattcctgtttccatgcaggtttgctcatagccttgaaaacaaggtcatgggagagctctatgctcactgctatggccattgttttataattaagtgaaatatgtacatagttctgaaatcaaatctaaaaaacaagatttattcatagaagtctaacttgtatccttgtcccctttactccatgatcttttcccctataggtaatcatgttttggaagatcttggtttatccttccatttgcaaaattacacatatatatgtaacaaatcacacacacatgtgcatattcatcctggtccctttcctcctttcttcgattaacagcagcatgccatatatacttttctctactttgcattttttttcatttttatttttttattttcttcaatcagctttctcaggttgaatctctactttgtatttttcaactcaaaacatattctggagatcactccctacggtacatgcaggtcataattcctcatttagagctgcatggtgtttcattctatggatgtatcatagttaaccagccccatattactgctggacatttggattgttttcagtctattgctattacaaacagcactgaagtggataacagccttatgcatctgtcatagtgtctggtctcagtttatatatttttatcataataaaacattatccattaattcttatttcaaatcttttaaaaatactatttttgtcagtatttctttgggatagatgcctagaaatgaaattgctgggtcacaaggtaaataaaaatgtaattttattaaatattatcaaatttccttccataggtggtgtaccgttttgcattcccatcagcactgtatgacaatgcccatttcttcatattcccagaatgtgttgtcaaactttcacgatggctattttatgttaattatactttctgccattttactaaattcttttattggttgtgtcagcttttatcattgcttttcttggggttttcaggtatatttttatatcacttgcacatagagattgtttagttgttgttctgtctttaattgttttcttgtttgattgctttggcttatagctcgggttttatgttaagtagtagtggagatagtgggtgtccttggctctgcacctgacctgagtggggctgtctctagtgcttccctattaagtaagctgctggttttgggattgagatttatatagttttatgtgccactgcacctggcttatgataaaaagtatacatcagtcaggtacagtgacacatgcctgtagtcccagctaccctggaggctgaggtgagaggatcacgtgagcccaggaagttgagaccagcctggacaacatggtgagaccccatctctttaaaaaaaaaaaaaaaaaagtatacatgaatttctattttgagtatttctaaaaacaacaactcaagaatagatattaaattttgttaagtatcttttcagtaattatggagataatcacttatttatgtgataaattgaaccatctttgcattcagggcataaccttcttggttatgttttgtttataagtgtatttacctgtgtgtgtttgtgtgtgtgtgtgtgtgtgtgtgtttagatggtagtttgttaaaggatgaaaaatctggagaaaataaattagggctagtaaatgaagaagctcttttcactacataacctctattctttggtgctctgtgcttcacaaaataaactgatttttctgatgattgtgcttggtttcaaataggcattcatcaatttgtattttcttttttttttcttaaattcttccattacatccaatgtgtattttattttcatatctaaatcttaaatcactggctctgtttcagttctttaaaagcagtaatcagcaccaaagagcaacagaactctatgaggggctgcttactttacatgaatttaacaaaggcactgaaatgaacaggcagctgggcagggcttcacatgggctgtctggatggtctggtggcagactgtctcctactgggctttcaccagacccactttcctctcttactgagccactaacttaataaaagcccttgcaactttagtgggattttcctttcgtataggtgaagaagagtgctaggttccctggtgagcatgttaggttttaaatgggtattcatcaatgagtgaatgtccatgttatttgggtccaaatgtttctctcttttcctggaacagagtggactctgtgtagataaagtttgctgatttgagttgttactgaccttccttgtctgtcctccctgaacgtttctatctttttttcccaaaagacatacaaactaaaataatctttgatttttacatgggcagatttaagttctcaaaggtggctgcaccaaatcccatcccaagtgcccttcttccagtgtgaagggcactccttccacgaagagggaaaggtgagtctatgcccttcactctcactgtgaatctttgagggcttgtgattgctctgaccggtggagcatggtggaagtgatgctatgtgacttccagggctgggccataaaaggatacagcttctctctctctctctctctctctctctctctctctctctctctctgtctctcggtctctctctctctgtctctctctctctctgtgtgtctctggttcctctctctctctctcgttcctctgtctctcagatgattccaggccccagacactggagtggagacacattatccctgctgtttgctgttcaaatccatgagcattaaaaaagttgttttacaccactaaattttggggtaatttgttaagtagccatactaacttcaaaaatcacacaaagccatttataaacatgtctgaaataaatatttcaaaaaaatttgttttcttttttggaggataggctacataactcttactttactctcatggttacaattattttaaggacgaggctagattccttttgctagttaacctatggtatatgattactcagatatatttaggttaaatcctgtccccttccatacataagtatagtgtgatatataccataattagcctctaaggcagctctgacctctcttctgagttccatacctgtgttttgagctgcctctttgcgttcccacttgcatattctgcaggtgaaataacctcacgggtaagaaagcaaattcatttcccccagctcatatatgttgctgtaacaacatatgcattgtcggccacgtagtttatactagaagcccacgggaaacgtcgaccctcacttcccccatccccaatgcacagggacagctgtcactgagtcccgctgccccctctcttgtttgtccatctcctccccgctgcccctgactcgttcagactgagtccatctcttttctgctacaatcttctcatttgtccctgggtctctttctcctgggttcttctccctacagggttaccagaattttcttcccagaacatagatagctctaccactcccttgctgaaaagtgtttcgttttgtttacaggatgagagtccaagctgatttgtatgccattcagaactcttcccaactggcaccctgctcacttttcctttcttttattctctttcattcttttctattttaaattgatagactatttttagagcagttttatgtttacagaaaaatgaacagaaggcacagagagttcccaaacagccccttaccctgccctctagtttaccctgctagtaacgtctggcatcaatgtggtacattcgctacaactgatgagccaatattgacacagtatatatatatatatatattttgttttttgagacagagtctagctttgtcgcccaggctagagtgcagttgcacaatcttggctcactgcaacctccagctctcgggttcaagcgatgctcttgcttcagcctcccaagtagctgggattacaggtgcccaccatcatgcctggctaatttttgtatttttagtagaaacggggtttcatcatgttggccagcctgtcttgaactcctgacctcaagtgatccacccgcctcggcctcccaaagtgctgggattatggatgtgagccaccgagcccggcctgatacagtattattaactaaagttcatagtttatactctgtgttggatatcctgtgggtatacctatatgtataatgacaagccattgtagtatcatagagaatacttttactgtcctagaggttctgtgctccacctattcacccacccaccctagcccccagaaatcactgatcctattgtgtccatacttttgcctttcgtaaaatgtcacatagttggaatcattcagtgtgtagccttttcagattggcttttttaaacttagtaatgtgcatttaaggtttcttcctgtcttttccaagcttgatgacacatttctttttatcactgaacaatattccattttctggatataccaggttatttatccattcacccactgaaggacatcttagttgattctaaagtttggcagttatgaacatagctgctataaatatttgtgtgcagtcttttgtgtagacataagtttttaactcatttggctaaagacattttaaaatgtaatttttcattttgaataggtaatcatatatttatgtggttcaaagattgaatgatatttaaaaggttcacagtaagaagtcttcctcccttgtctccatcctgtataactcttattaatttcatgcatatccttcaagtattttatgcaaatccaaaaaaactgaatatcaggccttattttctattgttttgtgtgaatgcagcacattatgtatactactattaaacatgattttttaatatataactttgaacttacagaaaagttctgcactttcctattttcacttaacattttctaaagatttttctatagagattgtccttatttttttcttacagctacatagtaatccattgtggagatgtaccatagttcatttaattagtgctctattggtagatgcttggactccttccagtattttgctagtccagaaagtgcagctgtggagaaccttgtacataagtcattttgtgcatgtgtagataccattggatgtacttccaaatgtagcatcattgggtcatagggtaaagcttttataagaattgacctccgtaagggttatacaatttcctgcttacttttctattctcattgttagctctgccctctcagcttgtaccctaggccccagctacactgaactgcttgccttttcttgaacaaataacacacttgcatttttctgtgcttttgctctttctgtcctttgctgagaagatccttcttctcccctcctctcatctacttggtagactcctgtttatccttccaggcctcaacaccaatatccactcctccctttagcctgatactcctctatgcatgtcaattgaaatttacaaccacctgaaactaggaggatgagttctggcccaggagagaggggtcctaggttcgtgttttgcctctccctttatagtgtcttgggcctttgagcctctctgaaactcagtttctttatttgccagatagagatcataataccccctctgcctgcattacaggctttagtgagacacacgtgagctgatgcatgaaagcactttgtaaagctttaaggagaacattgtgaagaaggattttttttttttttttaaagaattgactaatgagaattgctgtgactccgggtctcagttccaaaactgtctttggcacatcacatactactgaatctgcttttcaaacttactcttacccctttagttcccttacagttacatctgtctccatctcctatacttgtaccaagtacagaatgatgggttctttccatatttaggtctaggagccacaattactatcatgtaacttttatacaagcaactattaaaatacagacttttttaaactatgaagagtaagaacttttcataaaaacccatctattcctcagccatttcatgacattttatgttattttatgttattttattttattttattttatgtttgagacagtctcactctgtcacccaggctggagtgcagtggcatgatctcagctcactgcaacctctgcctcctgggttcaagcaattctcctgcctcagcctcccaagtagctgggattacaggcatgtgccaccatagccggctaattttcgtatttttggtagagacagagtttcatcatgttggccaggctggtctcaaaactcctgagctcaagtgatccacccaccttggcttcccaaagtgttgggattacaggcgtgagccaccatgcctggcccatttcatgacattttaaacatgtgtcctgaggtttccctagaaacctcatacttgagtgttgaggtcccaggaaatcattttctgagaatataaccctctattatataatttattatataataatttaattatatataaacaattatctaataattatataatttaattacatatacataattatatttaataattgtataatttaattatatgtaaataattatattatttaataattacagtgtttaataattatatgaaactaattatatactaggtggttatattctcagaaaatgatttcctgggacctcaacactctcaagtatgaggtttctagggcaacctctggacacatgcaaaaaccatggaaaaagtcgtgtggactcctcattcatccactcacccacctgccaactgatccccctttccaggcggttctcccttcaacttgtccacttagcctctctccatcttcttgtcagtcagtcccatccagccatcatctccatatgtcaagttcactgtatttaagactagaagagtaagaaataagatcctccagtgggggggtcagccccccgcccggccagccgctccgtccgggagggaggtgggggggtcagccccctgcccggccagccgccccatccgggaggtgaggggcgcctctgcccggcggcccctactgggaagtgaagagcccctctgcccggccagccgccccgtccgggaggtgaggggcgcctctgcccggccgcccctactgggaagtgaggagcccctctgcccggccaccaccccgtctgggaggtgtgcccaacagctcactgagaacgggccaggatgacaatggcggctttgtggaatagaaaggcgggaaaggtggggaaaagattgagaaatcggatggttgccgtgtctgtgtagaaagaagtagacatgggagacttttcattttgttctgcactaagaaaaattcttctgccttgggatcctgttgatctgtgaccttacccccaaccctgtgctctctgaaacatgtgctgtgtccactcagggttaaatggattaagggcggtgcaagatgtgctttgttaaacagatgcttgaaggcagcatgctcgttaagagtcatcaccactccctaatctcaagtaatcagggacacaaacaccgcggaaggccgcagggtcctctgcctaggaaaaccagagacctttgttcacttgtttatctgctgaccttccctccactattgtcccatgaccctgccaaatccccctctgtgagaaacacccaagaattatcaataaaaaaataaattaaaaaaaaaaaaaaaaagaaataagatcctccagcacagagttcctcagtttccaaaattacactggattttttctttcagctgcagtttgcgattggaacatcccaattttatattctttagtatttcccttgtgtattcagggcttttaacaacatctcttttggttgcagagtaggatggataaataggtatcaatatttataatacctattgataaataggtatcctctctgaggatgcatcagagaactcatctcaactttaccccaaatcctgccctccctctaggtaggcgtgttgaggaagcagaggaataacttcctggattatggtgtgtggatgtgtgtgtgtgtggatgtgtgtgtgtgtatgcatgcatgctcatggatggtacaggtccattcttacatggttgaaccttctatttaggaaaaaaatggatccaacattagactacttttccagaaaaacagtggattttggctaaggtttacattacttatacttggtgtccaagaggctaattataccagaatttacagagacagaattcttgataacaaagttagatttgacacataatattttttaaaagagtctttctttggtaataaatattgtctccattatttcctttcttaaagtctttatcatttcctcattttttttttcaaattagcttaaatttttgtctgttttccactacatgaaataccgtatggattcactgtcgtcaatgagtttatataactttcatgatttgggggaggcttttggtagattatttcccctttctttatcattgaaaatatttacaagaagaatagaaaattaccagttaatgatggctggtagcattgttagtaaaattgtccagatggaggctatatttgtgatgtgtggggtgtgtgtatgttgcgggagtcgggggagctgaattttaattctgaaagttatttcttacaataggaaagtacaagtcattctggaatcagagagagctgagcaaagctccatgaccactggacagatttcctccctccctccctccctccctccctcccttccttccttcctttccttcctttcttccttccctccctcctccctccctccccccactttctttctttcttcctttctttctttttttgttttcttctagtcagctccagaatcaggagtccccagtcttgtatggagtcagaagtgtctccctcacttccaagagaacatggcttagcagagggcttccttccataatgtcccctttcccagatgcatttctgatctcagacctttgcattgttcctccccaaagatcttatgcttcagtgaaataaaaaacagttcttctaaagtgtggttgaggatgttgccctctgatctcagcaccttcttttgtctttatttaaacttatatgaaccttaagaatacatttcctaaaaccagtcaaatagcaggcaagacactggggtaaaaaaataaaataaaaacaaacatggagggcatggtggcacacacctctagtcccagctacttgggaggctaagaggggaggatcgcttgagcccaggtattgggaggacagcctaggcaacatagtaagacaccatctctaaaacaaacaaacaaaatacacacatacacacacacacatatataattttaaataaataaaaaaccctcagtgatagttattaatgcttctttagagctacaaagttttaaaagctaaaaacatctctccaaagcatcccattttctttgccatcttctcccaccgtaagaagtttggctgactcatcaactcatctcacaatggtttttgctggtggtgccagggttgtgttcaccatcttgagtacagtacgaaaggcacaatggttgtgtttcattaattgaaacgtctattgtgtgagtgtctctgtttcccctttcactgggtcatatccagaaatagtgtgtgctggaatgtggatggggtgaagtgacggcatgaagctgatctttcttttcattttcgacgtaatctcacaaaataatgaagggcttgctctgtggaattgtttttgtctttggctctaggttcttttcgaggctcatgttttctatcctccaacctaacctggcaggtggtccctgagagagtggcaagctcaggacaggcggatccttggaaaccccctgattagcactgggcagtgctgacatttagaagaatgcttgcccacactccagctctgggcattcttatattgttatgtgacttgggcacccagaagtcacactagctgacagatttattttatgaaaggctgggtgggagtggccatggggcagaaagaccaattgctcatctctttccacagttcactttaataaccaaaggtgagaccagcaccgtctctgtaaagatccatcttttaagtggtgaacacttgccttttttctttttcttttctaatagaaattaagctaggaattttgacttggggaactaaattgtttttgccacactgaaagaagatgtcaggtgctttttggatatttgtacctagagaaacctcttttgcttcctcaaatcccacttctctggctcattaataatgtggcagttgtaaaggtgggtggattttatatttaaaagtggctgtggagttcatgttctagatggctgactttaccaagttgagctaattaaattttgtgtaagtgttcctgattttgtgagatctgctcccaaagtgggattttaagtagccagtctatctacatgagacaagtgtgtttacccctccccaaccccacctggttgtgattagccagatttaaaacataatggagcaggtgtgaatggctgtcatagaagagcccttatgaggcccgtgctctgtggcccgtgacaaagatgcagcaaggggcatgtgttccaggctcggggcctgtgaagggatctggctgcctggctttcggtctggtgcttaggagggctgattgggcccatctggctacttggggatccccttccttcctcaccattccgagtttggcctgaaaaacatcaagttggctgcatatattttgaactcctgcaaagaccatctggtctttttgattcaattgtcaacatttttttaatcaggcaatctgtattaagcccttgtagttctgtgccttaatgacatcatggcagctcccccacatggcacagcagggacctctctggaccatagagacccttcacatgccccttcctctcttaagcccttagctctgtctggagtaccttgatggctggcccattttttaaggtcaacccagatttctcccacgtgatacagcctctagcggaccatgcggatgtgtttcctcatttctttggacttttaccttctgtgctcccttagagctttgtaatttctccagccatccattcagccaccgatccaacaaaaggcttattgatgcctgatatataccagacttggggcatgtcagtgaactaaataacaaagatatcccccttccctcttggggcttacactctagctgggggagatagtatacataaacagtacatgtaataagtccatcagttctgtagtatttcagaaggggataaatggaatggaacggcaaagaggaaaagcagagctgggctgggtggatcagaagggcaaagcaggaggcagtggcacgatgcttcaggaatgaagcaggcaggcctgggagacactgaagctggcctgggctcgtaggaatttgtgtgcgcgcctttgccttcctccccagccaaaaggacagggcctgggcctcctcactgattttctgcttgcagcatttagcacaaaatgctttgcatgtagttggtgttctgtaaataattggggaaatggaaatgagtgtgtaaaaatgaatttgaagacaaataaaccatttcctaatttttactttttttctgcccttttaaaaacctgtatgataaatctgtgcttaagaagctgagattcttttcctatttactcattgttttcaagacaaaagttgccactggcactcagtgcggacaggggttttggaaagtgttggtcaatgcctggactactttttgacatagagtgcaatgttaagatgtaaacgtcaattccatttagaagagcacagaggagcagagtttgattactgctctggccagcttcgtgctctacaagaatcattttttttttaaataaataacttttgggaactgcatagagggaaaatcttgagtatattttattgtcagtttgccatgaaaaattcaagagtctcttgaaaacctctggatataattagttttcagtttgcaaatatttatcaagtaaaatgacattatcccagtgcagagcaacaccttaacatgaattgtgcagacccaaagtcacctgaccagtgagtgtgtgtgtcacacgggtttcagctcttacctgaggtttagcgattatgggaaatcaatacagaatagctttgtgggctgcattcagtcgatatagctgggtcttgagttaaaaaaagaaagatctaaggctgctgttgctttcagctgccccgtttaaaatgtaaatgattcctgcagctgataaaattctcccttgagagctccagagcactgtgtaacttagagacttgaattcaatacagcgtccaccacacaaagggtgtgtcataggctcgtagaatgtcagagtcaggaggcccccatggggaagctagttgcaggttcctctgccgtgggtcacaacgtggggaggggaaagggaagcacaggagggcgagactctgagggttacccacatcctggtcccgggcctcttcctccctttgcctggacatactttgactgattttattgtgcttatgattctgtgtaagagttcgtgtgaagaaggtgttctgaggttaaaaatacttgggaagaaatagtttgactcaaattagctcccccattttccaggtaaagccactgcagcctggagaaggtaagatgcaccactaagttgtgtgttctgcagttctgacagcagctggagatgcacctccatgggactgtttccttctgtgtccacctcactgtcttagtgtgaggatcaaatgggacaggcaggaaatcccacagtgtaatgcagtagttaaatgcaaatgttattatccttttctgttttctaccactagagcaaccatgtaggttatcaaactgtgtttcaggaaacccaaagggtccttgcagggggactcagggttctgctttctttaggcaaagatcttcccttttacctgctttctatcttaggcttctaggtgaagtttcttttgaaggtagggctcgtaaatagctgtgttcaatattggtgaatgctggcagccgcctgtgcctgttgaaatgggcaggcttaggatgttcaggatgatgattggctgaatacctggttcaagatgattgccctattacgtgagcaccaggaatagattggcataagccacacagtctgaaactcaccatggagacttttgagctgcattgtgaagacttaaaaatcagggtattcccaaggccttttattttttggctctgtttgtaactaatatgatggttcagtataagtacccaggcagaaatgaggtggtacctgacaggtgatggcgctttctttcctgtgtttgtttttcagtgcacttacatttcaatcgaccaagttccaaggacctatgccataatgataagcagacccgcctggctctggggagcagaaatgggagccaatgaacatggagtgtgcatagccaatgaagccatcaacaccagagagccagctgccgagatagaagccttgctggggatggatctggtcaggtactgcatggtgattctttgaaacaacttcctagaaaaggttggaaatggggacaggatttatttctccctaaaccttgcattttttaacataatccttccaaagatgatgtgtgccttttgatagaaactttaagatgatgagataaatgagtggattacaatggaatattacttaacaataaaaaaaaatcaagtggctgggcatggtggctcatgcctgtaatcccagcactttgggaggccgaggcaggtggatcacctgaggtcaggagttcgagaccagcctggccaacatggtgaaaccccgtctctacgaaaaatacaaaaattagccgaacgtggtgctaggcgcctataatcccagctactcaggaggctgagacaggagaattgctggaacctggaagacggaggttgcagtgagccgagatcatgtcattgcactccagctgaggcgacaacaacgagtctccatcaaaaacaaatgaacaaagaatcaagtatagatacatactaaagcataatgatcttgaaaacattatactgagagagaagccagacacaaaaggtcacatattgtgattctatttatatgaaatatacagaataggcaaatccatagaggcaggaagttagattagtggttgcctggggtttgggtgtgggtgagagaatggggagtgattcctaatgggcatgagctttcttttgcgggtgttgaaaatgttctaaaccttagattgtggtgatggctgcacaactttgtgagtacactaaaaaccactgaactgtacagtttaaatgggtggattttatagtacttgaaatatataatatatatataaaaatatgaaaaatcataaactagaaaagaaaaatagaacagagatcacttccctcctttcctctctatgtctcagttattttttcttcctttttcccctctcccagccactacacagcagaaggaacctgctgtgcgagctggatagggcagggatctttgtctgtacactgctgtgtcataagcactgggaactgtgtgcctggcctgtaatgagtgatcaataactgaattttgaatgaatgactaaagtagaaggtaggctggaacaaagcaacattctgaaatgcctttttttgtccctgaaatagtgaaatgaaataaaatcatgacatagttgaaagaagattgggctgggagctggagttcttggctttcagtgtggatgtaccaagttacatcacctctctgggccacagtttcctcattttttcaatatgaggtctagattggatgacttccgaagaactcccaaagctaacatcctagaaaaaggaatggggttggattttggttttgtagggggaaatggcacatttagacagtggtctcgggaactcactcctctgccacctgatggagaggtctgcgagggacacccttttggtagcacagtgacttcctgccttccttacctttccttactgttcctcattcttataaactcaggaggagcagcttccctgagctggggaaaaggcagaaaaagccagtttttaaaaaccagttatatatagctagttttctcttgattagcaaaatgaaatgtatagaataacaagaagtttttttttttttagcttatgttttgacagctctccagtattttttactgtatttgcagtatgagacttatagaacaggcaaaattaccattttaacagttgatttctaagggacagtggaagaggattttttgcctttcttcagagcacctgatatatctttttaagattatcaaccaataaagcaacaggagtttactgaatatctactttgttctagactctgtgggtacatgaagcagctcaaagcttcaaagggattttagtctggttgcaggaagaagaaaattgagcaatggaaattttaagaataatataagaagatagtaggagagaggtaactcaaagtgatctgagatttgatgccacgtgaatggcacagaattccagggtgtggccttcagcaaacactgcgggatgttcacagattatcacagactggtcatatttgggaatgctttgaggggcaggttcatttgacctgaagctgcaaggctgagggaggtagacacagaagatatgtttgtcacagacttggcattgtgataattagcaaggtcaggagtagatgacagggtgagagtttaaccttcaccatataacgttaactccatcttgggctagccatgtccagctattgtaataaaaagggtgtgaagagcactggtaggttcttcagggtggggatggagtcacaggcatctgcaccttaagtggatcttttgagttcatctttaaagcagctatgatcagttcagccaagcatagccagattttgaagggtcatttcataccaaccaaatcctaaaagtaactcatgctcattacccagcattctctctctctctctcttttttttttttagacaagtcttgctctgtttcctaggagtgcagtggtatgatctcggctgattgcaacctccgcctcccaggttcaagcgattctcctgcctcagcctcctgagtagatgggattacaggtgtatgccaccacacccagctaatttttgtatttttagtagggacggggtttcaccatgttgaccaggctggtctcgaacttctgacctcaagtgatccgcctgcctcagcctctcagagtgctgggattacaggcgtggaccaccacatcccaccccagatttcctttttaatgatttaattctagtattaatttttaagaagctccagatgatattgatactacaagtcaaaaaaccacagtttgagtggcaagttctagagtagtggttctcaaagtatggctggtgaacaagcatcacctgggaacttgctagaaatgtaaattgtcggtccctatttcacacccaggggccagcaacctgttttaacaagttctccagctggtgctgatgcacggttacggtgagaaccgctgctccacaggaaactttctatcagttggtttcattctcttaatttggggctcagtgcctccctaggtattgctgtgtgaggaaccactactttctctggccttgcttgcactctgtgtctagtgccagttcctccctggacagcttctatgagagcaggctatgtccatttcacatgctctttcaagggcctgctagactgtggttgattattcaatgaatacagtagttgcccctatacttatcctggtactttgcactttccagcagcatgtgaaatccaacctcagttcaaagagacataagggaatgacagtagcaatgtaataggcactgattttaagataaaggtataatttgtgtatgtttcctagaggcttgtgggaatgtaagcattaggcaatattgtttttataatgcgttttcagtgacatttatctcaaagctaagcttcatctgttatttttgattcactgttctctgaccactagtccctttctcctgaggaagaggcatataaagacacgtacacatttttgcatgtttcatgaagttggttccaagtaatgagtagccaatagaagctaacataaaagtgggaatttggccaggtgcagtggctcatgcctgtaatcccagtgtcacacgatccttacggtgttgcttttccagccggaaacctctgtggctggtggcacctttgcctgagttttggtcgggctgctgggcttgttccaccacttggccctgcacactgtactcagcttatgctactggcctggatcccatgccttccaagcacaagccaggcgcagagaggaaaggggtgtgtgagcaagcatggggtccagccactgcacacagccaggtgtgccagctgtggcgggatgggcagctctaggcgttggcacaggcactagctctgtgcgaggctgcagctggaccaggcgtactgcaaatggcttccactgcagtcaccaagaaacgtggtgcctggaagcttggaaatgccaggaactgcagagccccaaagagagtgtcacagtcctggctcagggagcccctaggtctggactccccaaagggctgcagctcttctctccttttcatcacctgcaattttgcaaatggtgggggctgggggtgtgcttcagcactgtttgtgttatagctctttcagtcccaccatttggcgggtcccaagctcttgtcccatgttcaggaagagtgagatacatggacagctggagagtgagcaaggtggtgaggagcttcattgagtgacagaacagctctcaggggacccaaagtgggtagctccattctgcaggcaggtcatcctgacgagtatccagctctcagcagagaggagacctgtagtgggtagctcccttctgctgcaggcaggtcatcccaacgagtcaaggaggcccaaacttggtagctccttcctgcagctggtagtcctaacgtctgtgtgagtctgactgagtctggggtttttatgggctcagaagggaggaagtgtgtgctgatcgggtcatgggcaagcctggaaaaagcaccataagttctcactctgggctgcgtactccacccggaactagcagaccagcctccgggcttccggccattcctggcttgaaggtggggtttcactggggacctgctcctttccgcccaggaaactgtctgcctcctgccatcaacgtgccatccatgatgtccaggtttttcatcttggggggcactggcaggcccacactgagctgccctcagccctcccagcctccctcctgtgctcattgatgcccaaagtctggagaagcccgaggcggcagggggctggtgtgtcagcaccaccctaagcatgtgcacacccagccaggttgcaatagcacctgggctcagccacaactttgctctgcactggagcaggtgctgggaagcgggaagaggtcagggagcaggaagcaggcacttccaagcctgtaggggcaagggcttcctgggctcctgagagtgcagggatgcccaggtccagagcagctgcagctgtgcctgggagcatggggctcccaccctgccaacttggtagggggtggggctcccaccagcctcgcaaagcacgcaacccagaccctgcctccctgttgcagccggcatcttcacagtggctcctccagatgggccaccactgctatcaccactttaggaggcgagtcatgaggatcacttgagcccaggagttcaagaccagcctgggcaacatggcaaaagcctgtttctacaaaacaaatgcaaattgtagctggttgcactgttgcatgcttgtggtcccaactacttgagagactgaggcgggaagattgctgagtccaagaggtcagggctgcagtgaaccatgattgcactactgcactccagcctgggtaacagatcgagaccctgtctgaaagaaggaaaaaagggcctgatgtggtgggttatgccccataatcttagcactctgggaggccgaggcaggaggattgcttgagcccaggagttaaagaccagcctgggcaacatggtaaaactctgtatctacaaaatatacaaaattaacccagtatagtggcccacgcctgtggtcccagctacttgggaggctgaggtgggaggtttgcttgaacccaggtggggaggttgcagtgagctgagatcatgccactgcactccagcctgggtcacagaacgagatcctgtctcaaaaaaaaaaaaaaaagagtgaaggaaagaaaggggaaattactttctggttgttagggtgccctttttttttttctttttttagacggagtcttgctctgtcacccaggctggagtgcagtggcaccatctcggctcactgcaacctccgcctcctgggttcacgccattctcctgcctcagcctcccgagtagctgggactataggcgcctgccaccatgcccggctaattttttgtatttttagtagagacaggatttcaccatgttagccaggatggtcatgatctcctgacctcgtgatccgcctgcctcagcctcccaaagtgctaggattacaggtgtgagccaccgctcctgtcctagggtgccacttataatccaaggtctgtcagacatgataatgcctctgggcctcaacatggatgagaactatgaagcgtttggaacctctttgtcagaagtatgctggtaaatgtttaataaccagcctggtggagggaaggggcagcgctgtttgagtcctttttcaatttccatggtgtaaatactcccactgtgaggggtttcaagctaccaacagtttcagaactggctcaaaatccctaaaatttaaccatctgctctccaagctggtagcagctggctccagcagattgctgcattctttcagtgtttcttgcctcttcttccctttgcataactactttattcttttttttcctgcatgctgacttttgctagtcccatttgtgtttaacaatggcactaaaacctagtcaattccaatatttcagaacatcttataattctggacacattccatcagaccttcagcatgttaaaaatcacaaaagtccttggcaaaaggccagtgtgaaaatttggaaaggtctgtagtttgtctttaggttgttggtgaatgtgaggactcaggtgatttaaaaggaggttcagtcaccatttgtaggcgggaggaacctgtgtaatcagagttactatttcctgaacactgtagtaagacatgctttgcacatattatttcatttaactctcacagtaacccaatgaagtaggtctcctccccttgagagtgaggacactggagcttaggagggttgaaggagttgcccaaggccccagagctagaaggtggctaagccagggatcccagggcctgctagcctcagagaggccactcctctatgtagtggagcacattttacttcacctgtcaatgacgcaggaatttcgggacactgagagatggagataagtcaaaaagtttcacacgctctttccctggatcaccttcacatccatcacctgtgttatcactcgtcttagtccatttgggctgctataacaaacataccatagcctagggggttgaaactacacaaatttatttttcacattcctagagactgggaaatctgagatcaaggcaccggaagacccagtgtctggggagagcctgcttgctggtttgcagacggccatcttcccccgtatcctcacatggcagagaacagagaaagaggacgtgttctggtgtctcttcttttaagggcactaatcccatcatggtgcctccacccctcatgacctcatcacctcccaaaggccccgtgtaccataccatcacactggggatgaggcttaacatatgaatttttggggaaaccagggggacaagcaatcacttcatagcattaccttcctgcttctagccctctggctgaaggcagggaatttccaatttccaaaaggtcctgacctcagaagggcctggcagactgcttgattgtggggaggagggaagattatttgcacctgagtcctataagaatactaggcccacctttctaagggggctgtgttgcctatttttattacttttcccaagtcagtgattatatatccatggcaaatctagttttacctgatttgagatagaaaaggacagggatctcctaatccatggaggcacagatgttgaaaagataagcagagtttctaaacaaacgggctttaagcaggagaagtacaggtgtgacccatctttctcagtgagatgtgttaacttttcaggaacgggcagggtgagcttgacatacctgtgagaaggtcatgggctcccagggaaagattttcctataaaactaggaattgaattcaggagcatctaattcccaggcccagagcaagctggacaaagcacacactttggaagaattcgaactgcacagaagatagatgttacagtggaactctaaccttggcccattgagtttcttccccttccctgtcctggtcctgcccaggcagaggggtagcagccaaagtgaaattaggcatggggccagagagcactgccctcttctggaatcacatgaatctgccgcatgtaggaggtgagactgttgggaatggctttaacattggcctctggatgccatgtgacttgtggccccaggtctctctggcatctcttctgcacccagtgacatgggattcatctgcatttctcagttgcagagggcaagggtgtaaccctggtgttattcacggcccatgtactatggagcagttggccctgtcctcatggcatggtaggaagaccaggtgggaataatcaggtgggacaaaggggtatctctgacccatggtcctggcacaagggataggagggtgaaatcagaattaggtctgtggatagtgctgaggtcctgttgccaactctgccagaggacatcaaagtcagcatgggagggcaagtgcaagtctagggcctcagtgtggaatgcaaacaggcagaacatcagaagagtacactggaaatcaaaaaagataagtcacaagctccgaagacagggctgttacagctggctgtgtattcacatgctcccagcacatgtttgcacgggcaagttggggccctgcaaaggccctgggaacaggattctgcctggaatgtctgtatgaggcattgtgaccagggggctaccagggacctgtggaagggaggaaggaggccttcgagtgtgtacaacgtggggttctgagaggcactcacagcacctttgtttgttccggagcctcaaggtaagatgagtgcctgcttctgttccttctctttggagaagatgacattgaccaaaggaaaagtcagctgaattcagtcttctagtgggtttgttcttttatccctctcctaaggttttagggttcagctttgtaaatcactgccttgtaaccgagtcttgctacataagcttaaaatgagaaatgtcaaatgaattgtcatgtaattatttgactataaacataagcctgttataataatcagcctatagattagttgtattagcttttcttctccctggcagcacagtgaaatatccctttaggaagcatcaaattagataaatttgaatagtttttacttctcaagttgaaaattcaccaagaactggcttgtaccaccattgtagtagcaccattgcccaggttctaagactcctgtgttcctgccacctgaattataatttgaatgaacagatgaatatggacacttcctgagtacatggcatgtaccatcctctttcataacagccagagagggaggtagtattgttttcaatctgcagatgagaaaaatcaaggtttggaaaggtcacattacttaagatcttaatgccagtgagtagcagagccatagctagaagctgggtccatttatctctgagtcatatgtttctctgccacagtgttctacctccagaaatttactgaccactttcctggtcacaagcactagcactgcatattttcatggatgttatctcataaacctactcttacaacaactaaatgatgtgggcgttcattttatagatgacataaaactgaagttcaaaatatataacctgcccaaggtcacacagagggcagtactgtgcaagagaaaatgaggaagaagcaaatgcgggagcccctgataaactcatcagatcttgtgagtcttattcactatcacgagaatagcacaggaaagaccggaccccctgattcagttacctccttttgggtccctcccacaacaagtgagaattctgggagatgtaatttgagatttgggtggggacacagccaaaccatatcagtgccctctttaaagggtttattaattggaaaggctagggggagatggatgtctcacttcaaagggaatacatattcttttgatgactgaagctgtaagccataccaatagacgtaggctgataggcaggaggagaaatatgtagaaaaggctgattatgtcccaaccagctgcccattcctaataaggtctctgagacagagacaggacaacgtcctctctggacacaggataatgtctggcatttgaacacttttaataagtaagcaaaatacctggtgtagaataatagagatcaaggccagacttggccttggtttccttttgcccaggttagagtcaggagggagtacatgccacagaggggtggttttgtaagggctagagctgaggtggccagctctgtgggagacacagtcagaagaggggaagacacacaggtgccttccaagagggagaagacactgggttcctgactctcctgtgtcgaagggaaatgaccaaagacagaaaacacccctatgattttttctttctttctttctttcttttttttttttttttttgagacagggtctcactctgatgcccagactggagtgtggtggcatgatcatggctcactgcagcctcgacctgcttggcttaagcgatcgtaccacctcagccttccaagtagctgagactgccagtgtgtcccgccatgcctggctaattaaaaaaatttttttttgaggaagaggtctcgctatgttgcccaggctggtcttgaactcctgagctcaagcaatcctgccactcccaaagtgctaggattataggcatgaaccactgcacctggccaccccatatggttttttaagcaaacatgtgagaagtgtgttctgggatacagtgcagttaatcagtttgcttattgttctgcagacttaacatgtttacacatgttggcatgcttcataactcggccttgcccagtctttggttactctagtaacaatcctgtggtatgaaatgactgaagtatggttctggtttccttcctgcaggcttggtttagaaagaggggaaacagctaaagaagccttagatgtcattgtctccttgttggaagaacatggacaaggtgggaattactttgaagatgcaaactcctgccacagcttccaaagtgcatatctgattgtggatcgtgatgaagcctgggtgctcgagaccatagggaagtactgggctgccgagaaagtcacaggtgagtgggtgtggatgatggagagttctgaggacagggaaggccacagagatggggtggcctgcacgtacagtgtcagacctggaagaaagacgtgccgttgcaggtcctctctgtgtgggactgtcatgctttggcatgcctctcatttctgggaacctccaagaagagaacctggagtctcctgaacctggagtgaagcagtctcttaacatttcgtattttctgtttgctttctgggaagaacctgcttttgactaccaggaattccatgacttaaaccattactctattaattggccaagagaatggtgactcttcttgtgtaataggtcaacaagtcccttcactggacagtagctccttgtcacccccaaccctgtagatctttgtgcttggcatgttcctctaaaataggagtttagatctgtgtgaggaccggtatacgccactctgggatttctttgtgagtgaagttcatttatctcacagtgagacagtgtttctagaagagcagaggactagatgatccacccagaagaatttagtgcccataaatttgctgctctgtggcccgtgcagcatcttgcttctaacacagccctggggaagtaagtgttaggggtgggagtggtagttttgtatccccacctcagcatcctcatttctggacaggatgagatcccagaatgggttaaagggcttcgaagagaactaagtagtcctaagagggaattttggcccgagcagctccttgggactgggtggtgaccatgtgatgtgtgcactgccattcttccctcctgtgctaatggtggagtagtaggtcacgacacttctctttcgttgaacctattcttggcctatgtatttttcttaactaaatttaccaggaagtctcttccaagtaatccaaaatgatgttggggatgaaacttgtgtgccgtccctatcttaggggtgaattgaaccaaatttgacccgagttagaagcggaagatctaccacagtagatgggaatcaagcctgttttctgtgcacaaagttagtccagtgatcagggcttctctggatgatgggtacgttgtactctatacaaaattgccccagtgaggcagtgaaatctagactgtggcttcctggccaagctgtatgaaggctgtgtctgtctggaggagggggtggcctctttctatctcaaaagggtgtagaatgggctagtggtgtccgtcagcaatcacggagagtttctccacctcatatgcccagcatgtacccacctaccagtgtgtgtgcctacttgcccagctcttacagtagttctagaactaagacagccagtgcagcccaccaggtctccaactctcctacaatgcaggaacttaaaactccttgataaaaacccctcctaagatgaagtcttactattgaatgcttccatcaagagtgctagtaatccatgcttcaaagcagtcatattgcttttaagttgaacctaacactttttgatctatgactgcgtttcaaaagctgagcgtctcttcaaaatgtagcttaaaaaattacacaaaatgaatgcttccattagttaactaaatatttaaataaaaaagaaccccagccatttcttggacttactgatttcatgtcgtctgatcccagcagcggtgtgatggattgcagtaagatttaatgcactccgtctcccaaaggctaacattcttaaaagcaaatgtctactataaatctgcccactgggaaactaatatctgtagagttgcttacaagagtattttttaaaataacttagtaggaatgatgtcaaaatcacttgtttaggccaaaactggtttttatttttaattgtttataattgtacttttatggtcctctctgaaaagataaatgacaaaggaccaatgcctaccagccaggaatgcttatttcagaagtgtaaatcagtgaagcaaaacatactgaaagaacttagtccagcactgatcctgcctctaggaactggttttcaggcaatgatggctttcctgtagcttgtagtttatgttctttatgtcacttcattctccaagaatccctggaagcagcaaataggaatggcccttttaagctagcactgataacttcctagtgtttgtgccctagacagcatcttgaagctggaaggctgagttgtcctgtgtgcatttgcagctcaggcttcgaagaagacatagcaagccagccagctggtaggagagtttctggtctaagccctcattcatcaaagtgaaatgtactcagaatgcaggcatttctaattctagatttatttagtcacacttctatttttataagaaaaaatttcccatagatttttcaaacacatacacacacgcatgcacacactttatctcacacactcacacgcatgtgtgcacacacacatacccagacatatgtatattcatgaatatattcaattattttaaaacaatttgttgtcattgccactatgattttctaaatgttgagacctgaaaaaaaagttgaatgaagtatttgatttgtattttttaaaaaaaaccatatagatttggccaaggagtaggggtgtaaagtgtttttccaggtgaaaagaaatcagaccagggagggggctttctatagatgcgatagagcattgctgtagaggaacagcatctctattatagaggactcccttgtggattgctaagtcttgttagctcagtacctctttcaaaggacctgtccctttttttgcatgtaactaatgaatgcttggggcttatttagccaaaatgaagagccttacatatttcctgttgattatgcttttaagatgggttaagtgactgttgctcatttaaaatgtgataatgcccagtcaagactggtcagaccttttaggaggtctcctagaaagagactcaatgattgtctgtttctctcttcaaaaattaaatggattcctccctgtagttaaagtcagtgtttcaggaaaaggattccctatacatttccatttgttgattaagtctttataagtatatttttaacttatggggctttgcactctctgcagagggagtgaggtgcatttgcagtcagctttcgctcaccactaagatggatgcagagcatccggaactcaggagttacgctcagagccaaggttggtggacgggagagggcgagttcaatttttccgaagtcttttctccagttgaggatcatctagactgcggtgctggcaaagacagcttagaaaaacaagaaggtgagttagtctctccctcacgattctccttctcataccctttctcttgcagctgtttctgagaacttgtctgaacttagaagggtgaacaaaaaggaatacagaatagtccttgtatgtaaagaccaacttctgctaaaagtccctgatgtgcaggcaagaaaacaacttgtatttatttttacatggtgcttcctcatccctggaggtttcctgctcctacccatgttattctcctttaatctctgatgtcattgtgttgccttttgtaatgcttactgcagccatcctcatacatcagtaattatatatttgactcatctttccctgccccgctagcctgctgggacttgagggcagaggtgttgtctcttactcatcttagggtccctttttgatgcctgtataattttttgttccatggatacttgatgagttgaattcttgccactccgtctgccaactagttactaacttattttatttatttatttatttatttgtttgtttgtttgtttattgagacaggatgtcactctgttgtctacactcaagtgtgttggcacagtctcggctcactgcagcttccacctcctgaactcaagcgatcctccctcagctgcacccctgctgccatcccaacagctgggactacaaacatatgccaccatttctggctaattttttttttttttgtagagacagggtctcattttgttgcccaggctggtctgacactcctgggctcaagagatttgcccgccttggcctcccaaagtgctgggattacaggcctaagccaccgcacccagcccctagttattaacttaaatcagaatccatgtttaggtatatgtggcgactagatagcttcttacttttgtgcctatgtggaaatccttccagaaaacccacaacagtcattctatatttgttggtgatgcatgtattttataaggcgaagttttggatcatttaggacaggggtctgcaaactatgaccttttggcagctgcctgttttaaaaacaaaattttattggactgtagccacacccatttatttatatattgtttggggctgctttctcactataatggcagagttgagcaggtgcaacaggaaagtttcaacggaaattctatggcccataaacctaaaatatttactgtcaggccaggtgcatgcttgtaatcacagtactttggggaggctgaggcagaggatcacttgaggctaggagttcagtttaagaccagcctgggtaacttagcaagacctcatctctccaaagaaataaaattagccagatgtggtgatgtgggcctatagttccagctcttcaggggctgaggtgggaagattttttaagcccaggagttcaaggctgcggtgaggtatgattgcaccacctcactccagcctgggtgacagagtgagaccctgtctctttttaaaaaaaacaaaaaagaaggaaaatgcttcctgactcttaatctagaacactttaggacttttgctatagcacttatgtaatatattctgggtaggaaggtaagaaaatactcacttttaaacaggagcttttaaaaaatcaaaatttttttaattaaaaaaaaactagcttggtgaaagatattaaataatgttgccaaaacatcaactctaaatctgataaagcctttaggtctagctactaatttacagaaaatacagaggatagaggaacaaatacgctgtttaatataataattgccgagaccagcttggttggggagaccctaacccagtggcgctagaggaatgaaagacacacacacagaagtgtagaggtgtggagtgggaaatcaggggtctcacagccttcagagatgagagccttgaacatagatttacccatgtatttattgacagcaagccagtgataagcattgtttctataggttatagattaactaaaagtattccttatgggaaacaaagggatgggccgaaataaagggatgggtctggctagttatctgcagcaggagcatgtccttaagacacagattgctcatgctattgtttgtggtttaagaaagcctttaagcggttttccgccctgggtgggccaggtgttccttgccctgattccgttaaccccacaaccttccagcgtgggcatcatggccatcatgaacatgtcacagtgctgcagagattttgcttatggccagttttggggccagtttatggccagatttcaggggccctgttcccaacaaataatgccatgaggatgccatctgcaaagcttacactgtgcgaaactacaggaaagatgactctgacaactaagatgcaagctgagtgggtgcggtggctcatgcccgcactcccagcactttgggaggcccatggagggtggatcacttgaggccaggagttcaagagcagcctgggcaacatggtgaaaccccatctctaccaaaaaaatacaaaaattaactgggcgtggtggtgcatgcctgtagtcccagctaccagggaggctgaggtgggcgaatcacttgaatctgggaggcggaggatgcagtgagccaagattgcgccactgcactcctgcctgggggacagaacgagactccatctcaaaaaaaaaagatgcaaggggaaaaaacaagaggcagagacgtttccaattctgattggttccaattcaaatcaataggctcatttataagacaatgaggaaatctgaacattggacagttgaagcaagcaaggatttgttgttaatatttctaggtatgacatgtaagtagagatttacaaagaggatgtgaatgtgccaacaaacctctccgtgtgatgcttcaattccatcatggtgaacacagactgaaatagtgttttaacaaattataacccaggggaagatgtagaaatgggatctcatgtaatcaaggatttgtttatccatttatctgtggtcaccgccaacagtcctaatggctctgaatattctaaatgcctctctgtgcatatatttcccaccgcagagaggacattctccaaatagagtattgactctgaccagcaagagtttatgggagcgagtttggtggactgtgcgtagtagattgtatgtactttcttgtggatatctattgagttattgtactggttgaggtacagctaaatgctgtaacaaagacaccccaaattaacgtagcttaaaaaaaatagtaggttatttctctcccatgttatagttcaggtatatacggccagtccagggctggttactgtgactcaacacaggaattccatttgtggtccgcttgtttgcatctcctagttggcaggaagggagaaaataaaaacaaaaggcaaacataccttgtttatagatgtgatgaggaattgcacacattgtttctgcttacctcctgttgatcaacatttatcacatggccacacatagtcacaagggaagtggggaaatagactgtagtttggtagttacagtcccagatgtaatttcagagtttttattactaaaaagagaatgcagtgaatggattttagttagtggcccgccacgccacagttttgtgttatagctactcttttttgtttgtttgtttttttgagacagagtctcgctctgtcgcccaggctggagtgcagtgacgcgatctcagctcactgcaaactctgcctcccgggttcacaccattctcctgcctcagcctcccaagtagctgggactacaggcgcctgccaccacccctggctttttttttgtatttttagtacagacggggtttcaccgtgttatgcaggatggtcgcgatctcctgacctcgtgatccgcccgcctcggcctcccaaagtgctgggattacaggcgtgagccaccgcgcccggcctatatctactctttccatttgtctgtcttttgtgtttttgcagaaagcatcacagtgcagactatgatgaacaccttacgggacaaagccagcggagtgtgcatagactctgagtttttcctcaccacagccagtggagtgtctgtcctgccgcagaatagaagctctccgtgcattcactacttcactggaacccctgatccttccaggtttgtccgaggcctggtcacgtaggcagaacataagtgcttcccttgaaagctcattcagcaagtgcgtagtaagcgcctgaccatgtcctccccttggatagcaaagtcacgtttttcagtcagcttcagtgtgggcagtgtagcaccaagggctttgattaagtgaattccttggttttagtcacatagtatttatgacagtcagggaatctagtagttcttttaaatttattaggttggtgcgaaagtaattgtggtccttaccgttacttttgcaccaacctaataccaaatatttactcagtatatatcatgggccaagcattgtgtggtacatgagggatacagaaatgaacaaaacacagcgagacagagagatgtgggaatgctcatgatttatcaaaacaaccagttcctgtgagttagagaataaaacagttcggaggcaatacagattgaagcaacttcaagtgtactggccccttctttaagacattgtgttttagggggttgctttctgcccatgtgcttcagcaaaaaggcagcattacacagggatgaagaatgcagcctctaaaatgacctgccaggattgtgaatccgacctttgccacatagtagctgaataagttatttcacctctctaagcttcagtttctgtgtttgtacaatggggataatatcagcccctacctttacatgcttgttgggaggattaaatgagataatccaagtcaatacatagtagatttaacgattatttatgaagacgatctctgatctcccaggcagacagcagcccctctccccaggaacattctgtcatgtatatcaggaatcatatcatcagtagcttagaaccagccatccagtggtttctaaacctgttcattgctagaatcacttggaggagttttcaaaaaatacagattccttgactgaaacctattgtatcagaatctttgaggtggacctaggaatctgtcaggtaagtctgatcctcagcctagaaggctctagaagcctgcccattccagtaggttctctggtgtttttttgggtgttccattggctgaacatcattatcagtgtctgaaagtcagcttgttaaactttgaatctgcttccaaggtatttgctggtattaaatttcattccttttgcagctgaaaatatttattctccttttactgtttcaggaatataagacagtgattgcatctagctagggactggttcttagatgactcaggggaaaagtgaagcacctcttgtgaccctttggcctcattttttaaactactgccaatatcaatagatgtttctaaccagacctgactgcggaactcagtattagctgttcttagtttttcattcactcgttcattcaacaaacactaagcacctactgtgtaccaaatattgtgtctgttgtgtaccatggatgaagtgtgtacaaggaaagtggtggcacaaatgagatgatgaaggggaaaacttcacagaggaaggagctcttgagcactgggcattgtgagaagaataggggttctttaggtaaaaagcaggaacaacagtctgggtggagaggacggcacatgcaaaaggcagagagtcatgaaaccacatgaccacgggctagagccgtgcatcctcctgtaggtgatgctggtcactaggtgactattgctcctctacccccagcccctctgtgaaacaagcccaccaccctcccgtggcacccgtcagcctttatctgtgagcctcaactgctctacgccgctcctggcagcctctcaggaggctcctcctgtttgagtccagttgctattcccttgattttctctcccagttctgaatgtttggctccatggccataccttctacccactttttgtcccaccagatttggggctccgtcttccctttgtgtctgggcctccctcctcctggactgtgacctagtttgctcccctaatgctggtggctcaatagccccttgtgaggaccctgctggatgacaggggtacatatggacatttggagttctattttcaagtgtctggaatgctctgcgaagtatttgggcatggctttttagggaacaggacccttccaaagagtgagttgagctgaaccaactcctgttgtccctgatgtctcagataccagctctaactgtgctcaggagacagggccttgtgagcccaggacaccaacgtaaaggaactccacttcctaggctgaaggacatggcctaatccagttataaaaatggctgggcaatagccttctgatagttaaaataaaaaattttaagtacttttaaaagaaaattattcatggttaaattaattttaaaaaccttgtattatagaagattaagacccttctggaagacattcgttgttatcttccatggtaaaagagctgcatttcctaccatgactgtagaactttcataggttgttattctttctattcaacatttcagttgtttctctgtaattgtgcttgctcgacttactgtcttttgtcagcaagaaacataattaccttttgttaggtttttaggcaagaaagttagggagattttggcttctgttaatgctaaaaatgttagaaattgtttcatagtagcagacttggaaaagaacagcactttagtctttatccctcccagttaatgttaaaaccaaaaaacgtgatcttaccgttgttctgcctgcctggacacttgtctgtccttttctcactgtattaattatagatcttgtccttgaaataacttgcgctcacatcctcttttctactccctccctccctcctcctactatgtgctaggtagtatgtaaggttgagaagtggaaggagatgctaaagtcagagtttgaatgcctgagggagatgcagaagttcttcacttaattatattgagaaggcaaattccatcacatcaacatgtgtgccacagtcattcaaagagtgacactgattggctttagtatactggttctgacttttggaaaccatttcctaggaagccagcacttgttaaagcttcattgatgtgaagaattggagaggggaggagtagagaggtaccttagcattgtgagagtgtaaaattcggagtcttacagtgtgctggagccacggaaagctgattgtgaagagagcctctcttcccaactccacatttggtgatgtcattggccccttgaaatgggccacagtgggggtatttacactacagaaattggcaaatgccataaaactgagctatttttttcagagatatagttgttagaccagtaaaccactgagaggtccccacatgcaggaaaatacacaaataaatactcaagatacaggccaggtgcggccgctcacgcctgtaatcccagcactttgggaggtcaaggtgggtggattgcttgaggtcaggagttccagaccagcctggccaacatggcgaaaccctgtctctactaaaaaaaatacaaaaattagccaggcgtggtggtgcacgcctgtaatcccaggtactctggaggctgaggcaggagaatcacttgaacctgggaggcaaaggttgcagtgagctgagattgagccactgcactccagcctgcatgacagagtgagactctgtctcaaaaaataaaataaaataaaataaataagatacaggatgggtaaaccagaagggggagaaaatgtagaagttctaggaaaatagggtgtctgagctactttaagtagtggcagggtgctggagagatgccagggacattcccctctaccccacctccttatttgtatgtctgtgtgtcttttgtttcctcctcttctcctctcagtgtactaatcttttttttttttttttttttttttttttgagatggaatctcactctgttacctaggctggagtgcagtggcgtgatctcggctcactgcaacctccacctcctgggttcaaacgattctccttcctcagcctcctgagtagctgggactacaggcacgtgccaccacacccggctaattttttatttttagtagagacggggtttcaccatgttggccaggctggtctcgaagtcctgacctcaggtgatctgcctgcctccgcctcccaaagtgctgggccagtatactaatcttgagaagttaaattggcttgggcaagatattaccatctagataattcaaatgtcagaaacagctttttgttactggagcaaacatcatgagccttggtcagcatgactcatgcagcctttggagccacgtggggcacagcctgcacagatagacagagccgaaggccctaggcaacatggtgcctacccctccaattccattctgaattcttccaacaccagctgtctcctctctctgtcctacacatctgacttttcaaaaccccccagagccgccatccttaaggctgttcggtgcttcaaaagtactggctctctttccctttaaaatggaaactcccttcatggattagttctgctctcagccaggtatgactttaaaagtttttttttgtttgttttaatttttgtgggtacataaaaggtgtatatgtttatgggagccaggtgtgactttgactctatgattaaagtggctcacagtaaagctggaataaacatagatgaaccactctgaggggcgcctgcgtttttgagagaaacttggtattgcaggtttatttgagattggttcaaatttgagcagcttcctctgaacagggatttatgtattgttctttctgtgctaactctcctcagtagatttgccaggaactccaggtcacaggagcagcctggtttgttgcttggagagtttctgcatcttcagtaagagcagagccatgtttgaggacaacactgttggctagccagtgatattaaattctaaattctaaagcataaaaagtattttatttttctgcagcagtataaggtgtatggaaaaactaacagaagaatataagagtgagaggtagtggggaaaactgaccttgcatttagatctgaatttacttctagatctgccacttagtaggaatgtgattttggacaaagcacttagcttctgtgagcctcagtcatctcatatgtaaaatgggacagaaatgtttgcccttctttgttcactgctgtatccctagtacctagaacagcatctggtactcagccagggctcaacacatatttgctcaatgaatgaatgaataagagtaccatgagaattgaatgcagatgctttgagaattatgctgtgctatgaaatgttagagattttcatggtaatgttgctgttcttccaaaatgagaaaacaaatgattggaaaatagttttttttgcattggcatgctgcatccctcacaaggctttagagggaaaaatggacagatgaggtaatggtatatccagtggagtatgtttcttggctgtgcctcaaattgtcactcaaggctaaaattctgcagatctctgcaatggagtttggatgcccacgctgtgcgtcgtgtcatgggactgtgtgtctcagcccttggatttgtcttcgtgagagctggatgctgagggaggcttcctttagtgttgctcatggtctcattgatttaactgtccctcacaaggtccctttaaagtagctcggccagctttgaacctcctcatgaactggctgctgggctgtgccttgccattggaagcactttgtgcttttgggcccatcgtcttgtattcctgtcacaccacaccacagaagtctgagtgactggggcaaattcccaacccagggtttggtgacttttctgaaggttggtctgagagtcagccctgaggacagaggcagaatcagccttctggaaccttctcaggtgtgttctgcatccaagccatccacgggacactcgggggcgtcccatgcatgtgatgaaatgggcctcatcctggtcaggtgggctggacacggttgggtgtatctgctaattgtaggtggtggagacagttgggtgtgtctgttaatgggcttatgttcattcaagtagcatttaagaagctaccgtctgtggcttacctgtgggaaaatgtcagagtatctccttatctatttggaattctaaatgtgattttctgtaaagattgataagaaatcaaaatgtttgggaaccactgagttacccccattccccttttctgggtacatagacacaaatgatgaaacctgaattatagataatttccacatcctggtttaaacaaatattaatattgcaattattatcagcaataatttttgttaatattttatgtaattattattttttagataaccttatttattagttatataatttattcaatctcaaaaaagcttttaaccacctcaatacatttaggctttatattttttattagttgagtatactaagctttgaaaaaatatttggagagctttggctgctttagaatattttgggaacctcctcatatttattatgtattctttttaaactaaaatggatagatgagagggacaaacttatggtatctcttctcttagaaaagcaccagacaccctcattgattaacctctccattccagtgagcttagggtgggtttaaagttacatcacatagagcattctgagtttttactatgcatttatcctatattgaatacagaagaccctgactgtggttagcatgagcttactgaagctggcatcacaagtttacaagcttcatgacagaaatagaaataaacgagttgtagaagctagaagggactgttgagatcactgtagtcagatgagagccagagagggaaaacatggacccacagtgggtcagacgcaaagcggggactcacacccccgttccaagtcccagcccagttccctgccctgctctgtgggaggtagctccgcccagcggtgctgccaggctgtccccttccctcacttcttggcatggctctcccaaggggtcctgtgtcagaagagtcctgagatgcgcagtaagggaagcactgaggttttaggagtgaaatggcaggtttcctgatgaagatactgctcccacttgggtttggagtgggctttggagtggcatggggattgaatgaagtagcattgcatggggcctgctcagtaggctccgcaggagggcgtggtcgcagttcccttgcctgccaggtgttgagcctgcaccagttccaccgtgaagcctaccagcccaggtgggagtcttggctttgcccagttctgcccagcgcagagccctggagctgagaagatgtgaaccgagctgactctgggctgctgggtgggagccccgggcctgtctaccactgaagggtttctgtgccagtgaaagaggctgatgctgctgaggtgacatgcgctgacttcccaggaaaccccgagtgctgtctggccctcaagggtaggacgcctgtctgtagtgagacagtcctgctgtcagagcccagaggtagcctggagacagctggttgtggatggctaggcgtgctctctcctggccctcctcctccccactgctccattgcagcgagccctccatctgcagcccttttgcagaatcaactgactcaccagttaaagaattcaatttcatatagtaaaaattggtttaaacagttttaggttttgcaataattcctttttcatattcaacagccattcattcaacactcagtagaggggtatagcaatcatctattttcaaggggctgtaggaagtggaagtgtgtgttccttctgtgcaagggtagctcccctatgtctttagggggtcttcttttgatgatggctagggagggtaggttcttggcagggcttgactttgagcaggtgggcgcagcctggcatgccttatgcttcccagtggatcggagatgggcccagtctccaattatatttgcgtcatctatagagaacagcagagtacctgacactagtcctcaactagtaccactcagttcaccagcttggggtacgaaggtctcactgcttttaatactcaaattaaattagtctgggccccaattttgcatattgtgatcagtgtctttcttttctcacttgagactcctgtcccatggcaacatcaggaagctaacctaagagagtacttctcattactgttgtgtctttagtagtgctcttcagactgggatatgttatgaatccgcagggatcttgttaaaattgcagattctgattcagcaggacagggtggggcctgaggttctgcagccgatactgttgctgcaagtccgaggacaaaattggctggcaagggttattggctcccagtccttttcaggtcatggcatacctgaaaatagtttttctttgtctgtttgtttgtttttgagacaaagtctcgctcagtcacccaggccggagtgcgatggcatgatcttggctcactgcaacctctgcctcctgggttccagcgactcttccacctcaacctcctgagtagctgggattacaggagcactccaccacatccggctaatttttttttatttttagtagaaacggggttttaccatgttggccaggctgggctcgaactcctgacctcaagtgatccacctgccccagcctcccaaaatgctgggattacaggtgtgagccaccataccttgcccatacctgaaaatattcatacctgtgtgccatactggcaaggctgccctggcttcctcaagctccagatgccccagggctgagggaatcaacatcctagctcacctctagcccacttgaggtacccgaggtgggccacagtgcacctgttgagaggagaaaaaaatgtccaaatctgacaaatctgacctatacatatggggcacatatggggagttccttctctcctgctgttattgcaggtgctgccccatggtacagctgaaaacaggcaatccttgggacgcagaggtgcccatgcctgccaggagcagccctctgatccagcagtgtttcctctggatgtggggagggtaggataaggctctctccccggcgttacagttggccgtagtggtcccttagcccgttggcctgggatcccaggccacagctgtttatatgcgtggctcttgtgtgtgtgtgtgtgtgtgggtgggtgggtgggggggtgatgtatcctagacttgtacaagtacacacacatgcaggcatacgcacagccattttcccgaagataacatccatcctgccgagagaactgaattgaagagagctggggggcattagctacctgctgtgccctgtgctagctctctcacacaaccagacttctgtgtggtgtgcaccctccaaggcctcttctgtcatctttcttactctgtcccctccttgggtctgtcagagatattccatagatttttcagtaaggtagaacctcagaaaaaaactaaaaacaaacccaaaccaaaaggcccttcctttcccaaaggctgcttctcagaccacggtattaaaaaaaaaaaaggcaaacctctctcgctcagctagatggctccttgcaccgtttctcagaacactgtttgtttgcctcactttttattgctaaaagagtcctctcaaatggttcagaacaaaggaagtctgttttgatgtctctttgctgtaagtagaggaatttgcagcttgtaaatggctgcagttttgctaaaatagcgactaaaacatgcagttatgtctctcttggcactcacccacccacccgtcacccacacccaccacccaccataagttggcttgggaaatgtttgctgaataaaaggacagtctctgggtgttcccgggtcccagcctctgcctggctgaagtgcctctccttcctctccaggtccatattcaagcctttcatctttgttgatgacgtaaaacttgtccccaaaacacagtctccctgttttggggatgacgaccctgccaaaaaggagcctcggttccaggagaaaccagaccgccggcatgagctgtacaaagcccacgagtgggcacgtgccatcatcgaaagtgaccaggtgagcttgcatgagggccacagaggcggaggcggaggcgggcgggcgaggtcagcgaggaaggaggcagggaagcagatgtcaagctagaccctacccccacccatccagtgtgaccgggcttctcccagagaccaggttcctggggcctttcctagaaggctggtgtccattttcctgcccaggctcttgaaaccaaataagacaaagcttctgcttctcatgttattttggaattcagcaggctgagtatcttacttacatttactgtttacgtaggaataataggaatatgcagtacgttagggataactgttatatattgtgtaaaattccttatgtacttttgggggtaaaaagttgttatttgctggcaacattttattaaagatacaatcatatgttgtttcaaaaaagttctggagttggctggtggtgctggttgcacaacattgtgaatgagcttaatgcactgaactatacattttaaagtttttaaatggtcaatcttatgttataatacatatgttttaccatagtacaaacatagttttagaaaatattctcatattcctagggttttttttttttttttttgtatttttagtagagacggggtttcaccctgttggccaggctggtcttgaactcctgagctcaagcaatccacctgcttctgcctcccaaagtgctgggattacaagcaggagccaccgcgcccagactcatattcctagttttaaaaaagaagtcgtaatccttcaaagtgcagctctccccagtcccacacctttggttaataaagtgataagtcatcaattcaaacaagaaaaccacccaaagcacgttccacagcacccagtgtgtccacagcagccaccccgatggactttatataaattcaagcctatattttgctgaagagaggaagaaggaacgtgcttgttagacactcatcagttttccccaactatttatgtaacaacttttaataggtccaaactggcctgaagggcccaaaagggggaccttttgtgtaaattggtgctgtggactgtgtgagcctcttgcatttgacatggtggactatagaaaaaggatatcaagagaaaaatccaagcaataaatccagatgaattcagaaagcatctctgagaagggctgtctcacttttctgagagcttgcccttctcttccatagaagtgaccatttgacacgtaaaggtcgcacagttattttacatctctcctccctgccagcctaaaaaggctggcagataatcggaagcatgcatgctgccactgcattcaactgtgttttctccagggctgtccacattagttcctgatagtgcttatgttcttggtggatgaccataagccccaagtagatgaaaactgtcgctgtgtggtgtatggtgttttgggtatttggttcattagaatgaagaggtagaaagggctgtgtgttcaagatgaggctgctgaggctggtgggttttgaaatttacaaatgactctcaggtggagtcacatgatgctgcatgaagcagtggtgggcgggtggtgagagcagcttctcagttctgggactcatggggcaaatgaaagctttcactgtcatctgccataaatgagtgagtcccatggaagaagtgaactcaccatctcagaaaaagagtgaacaggggagagacatggcacctgtttattcattgatccattttttttttcattcaatgaacattttttgagagtgccctcccagtcactggaggatagaaatgagcccagttcccatccaaggggccacagctgcagaggcaagccagcacaaggtgggagacagcgcccatggcagggggaacggtgtggcactgtgcggggaagaggaaaggctttgcaaggaagctgaagatgggtgcacgtcgaccaagcgctgagaaaggggatggccctccagagggcagggccacctgtgcaggggcgagacagcagcagaggctggagggctacagtgaattcagtccagctgaggagtggggagatgcaggggaagtggtcttggatgtcagaagggccttccctcagtgtcactctggggtctgggctttgtcctgaaggcagcagaaagctgtgcaggtgttctaagccgggcagtgacataatcatactggcattctagaacaatccctgcggcagtcgtgtgtgaaacggagtgtggggaggacaggaccttgagcaggaagccagctggccccctagagggtttcagtgtccgctgcaatgtcccctgctattttgctgacacctaaagcagtcgtgtccttcctcaggagcaaggtcgcaagctgaggagcaccatgctggagctggagaagcaaggcctggaagccatggaagaaatcctgaccagctccgagccactggaccctgcggaagtgggggaccttttctatgactgtgttgacacggagattaagttctttaagtgaagtaagcgttccctttccccttcttatttaagacttcccaccttactaaattaccagcaaaacaaaccactctcctgtttgagtaaaatgagaaagttaatatgtggcctccttttctgaagccagatcaaactgttaccttgtgttccaccttgaatctcacagcgtccccttctgcaatgtaggtctccttcctgtgcagtgtaacatgtatcccgttgcctgttgttcggttgtgtgactaattgtggattttaagctgctattattgtatttcagtggcaatggacacattagccttttacaagaggactagagttcatcaagccttgaaaggcaggcttcacagtgccgagttggcgggaaaagcaaattcttttgaagtcttagtctttccctcagtagcggtttctttcaggttaacaagaggcatttgtgcacacacacagggctcttgtgtgtgttgtcaaggggaccctccgtggcctcccgtgagtgcatgcctgtagtgcacagtgtctctacaggtgtcttctggggggcagaaccaattggaaggaagaaagggacccctctccagtcctggctccttcctacatcctgggctcctgaagaagctgtcttcccattttccatgcgctgtgcttatgtgtggtggactgcagagctgcttccacttacaggagagctgataatttgttagctggaacctattcacttccgagattcagacatagccatgctggtggccttctgaatcactgcatggatgtcccaggaggcagctctccccacacagcagcacagccatcacaggattccttgtgtagaaatgattcccagtctagttaccaacagctagtctaggagtaattgaatggccctatggcacagttccacccacagagtagtgaatctctcagccaaggagggaaagaaaaggaagaactcttgactatttagattctagttaaatatctggaatcctagcagtcactacattatctcagcagagagactttaattaaactgatttgtttccaatgtcgggttcacttaaaggatttgacttaccaccagagcatagaaaagcatgcaaggaagaccagatgggcttagcattgggaagacagagggcaaggaggtgatagatggatatagaagcatttctctgcaggataccagttcaggccccaccattcctgccaaggccattacatcccacaaacccaaatacaaagcagctgacttccctggatcttccccccactcctcacacctcacatgtcccaggagctgccttcattcaggcgggtagctgcactgggcatggggtggtggtgggagcttaccgccacctattcaagctctcagctactcctgaaacgggcagagatgatgaacagaagtgtatgtaaatacagcagctagtgggagagcaccagttgggcctaatcctgcctcatcattcttggcaggaatctgcaaatggaaacattgtgagtatcagcaatctgggaagtgacagggttaataactccttcccagaagctgtatcatgagattttgaggggaccgagccctgttacatggatgtgaacagtgaggatcagaggttttatcagaacacattctttttttctaccaactctccagagcgtgagtataggagtgccatgagctttttagtcagcagttttgtaaactctgtatataaaatcattaaccacacattgtgggtgatgggaagacgatttcagctgacagagttaatggcaaccaataatggtggcctgtagctgctaagagcttcacgcaggtttggcctgggctttcactgttggtgaatttagagtgtccttttaggtggggcggctattctaaaagtgtctttctatcactgttaagggggggggaaagtgaggttcgaggatgacgtaggtaactctcccctcccaagtccatgttccaagtggctatgtaaagcaagatgatacagaaagctgctctaaaatctcactgagtgatttcaccttcgcctactatgaaatgtctcatcagacctgacatgtctgagataaccaaggtgattcaggatttgatcaaaagaagtctagtaagaattaattacacagaagcctcctttcatttctatgggccaaacaaaggccatggataaccctacccgctttatgtcattacccattgggaaacacaatggctacttctgttagggtacattgaccttggtcaagcatcttaaagaaggcaaccctaattgagagctgtcttggctaatactctgcaccacaattgtgatgtcctagtcctaccactagagggcatggtacagcctggcaaaagttaaaaggggtgtggcagctcccatcaggtctggaggtggtctataagcacagttgacagttgtgcattgggatgggtggagaaagacgacaagagagcagagaatctgctgatgtggctgcgcttacttttagtgactttatgtacttatattaacagctggaaataggttgttgggttttgagcaggctgttatagtgaggaatgttcatttttaaatgttcctaacagattttgcttttgaaaaatgcttgttacatgaataatttgtggaccagggattgcttttctgaaggcagtatagggaacatgaatattcaagatgaaatacaaaaattatgtttaagggtcatagtgtataagtagcttcctaggaaaccctttgtgtatcttttcagactggggtgggggctgagcatgcttgtgcagaaagaagccatagccagaaaggacagaatctctcccccactcccttgccccataaccaaacataagctagctagtcttgtctaatagatgggatttactataggtgaagatagccctcatattcaaggacagaagctctggcaggagtaaattagcaaagcagaaatagtaccctttcattcttggaggtgctttgaaattttaggtagaatataatcgaaattatggaggttccttagtgctcaataatataagacctggtgttattagaacgagtctttcttataaactaacagagcaggtatatgcctgttagaccttagctgtggggttcctttactattgggtgaatcattaggtataaaaaataatcatcaaccaggcaaattactttgcttcctagctgatgtcatcccacattggtacaggtgttattcagtactgggtggttcagcagggaagccgggtgggaccagtgtgtctgtcatgaaaccactaactgcattcctgactgaagagccatctgtcatttattggggaaggtcttcagttgagctctcagccttaggaaggaagcacgtggaggagggacggaggaggttcccttgctgggcatgcttcgtagagggccaggagcagcaggtcatgtgcacatgccgttgcagcacaagcttatgcttcccgtagccgtggcttttcattctgcacagtcccaggtcccagctcccctcttatggtttctgtcataatgtgctttatctgattgactccaaacatcccgaaatgtcacctgcagatttctcgtgggaaccaatatgtacatgtttgcaattatgctgtgagaatttaaatgtgttagatggaaaatgctattggcagggaataataataaaaaaaaaagaaaatcattctgtttcctgcagtgggaactggccatgtagtcttaacagtcttttgtacaaatatctacaaagcagataatatccctatccagtgcttgcccttggaattgtctctaaatgcatcaagcatacaataaaaaaaactgaaattaacatcca

SEQ ID NO: 222 - DNA, 7819 bp, Homo sapiens
agtggagtgggacaggtatataaaggaagtacagggcctggggaagaggccctgtctaggtagctggcaccaggagccgtgggcaagggaagaggccacaccctgccctgctctgctgcagccagaatgggtgtgaaggcgtctcaaacaggtatctgggctagccaaggttaatccatcagagttgtgggttttcaggcccagacagcccgcagagccatctgcctgctgggtgagggactaagggagtgggcagagggggaggagaagcagagccaggggagggactgaggctgcaaccaggaggtgggggtgggggaggtgggtctcagttgcttgggggagggagcagggcggaagggcaggatgcacttgcaggggtctcatcctggatttctcttcaggctttgtggtcctggtgctgctccagtgctgtgagtaatccctccacctccacttttaagtccagaggcgtggcgagggcacagggcaggtgtggaggaggtcttagctccaagggaacactttgccaggttcttctgtgcttccaatgacttcgaaatagtcacgtttgctaaactggagtgaggagtatatggatgtttattttgctatactctttggtatatgtgaaaattctcaaaataagaaactttaaaaggtcctggttcagtgaaggctttgactaacagcccctgggagccgctagtacagttgcccagtagctgcttggatgagtgatgcccacattgtttgcagcaggagaaacagaattagaggcgaggaaggatttcctggtccattgtgatattgtgccccagcctgggggacatgccgagggagcacaggactgccattccgggtgggttacaagttagaggcactctcaccaggaggcagagaaaggtgggccagagtccctcatggatgaaggacctcactgcaggtcactaaaggtgccagcctgaaagccagggccatctgtgacacaggctatcttgggccttcccctcccacaaagccactgcttccaggaagcctgctgtgctggcaccaagtcccatttcatccttattccccagctcctacccttcccccacacagtgcctgtagcgtattcatcccctgcattggatcttttctaagcattttcagaataggccttattttcaccagtcagggaactccccagaggcagggggacctgaaccagctcctttcatttaagaattctgactttgctcacaatctgcaccccactcctccctacccaaccccacaccccattggtgctcagctctgggctcagcctgaggtctcttgccgaatcctggcccgggccccatcccagacttctccttcaggctctgcatacaaactggtctgctactacaccagctggtcccagtaccgggaaggcgatgggagctgcttcccagatgcccttgaccgcttcctctgtacccacatcatctacagctttgccaatataagcaacgatcacatcgacacctgggagtggaatgatgtgacgctctacggcatgctcaacacactcaagaacaggttgggccagggctggccaggagaggagggaccagctgggctggtcccagggcagggcaaccccacccaggaggaagggcgaggccccaccctgctcacctatgtttggagagttagaggggcttggcttaaatgggtggaggggatgactgtaggtgctgggcaatatttggggtgatgagagactgtagacggaagcgcagctgagcccctctgggagaggggaaccctctcctgcccctaacgtgctctccagggagcatggaaaatgagcaagactctactttgccatactctgtcttctccactggggaaaacaaaaatgggcagcagacctcagagtaactcccatgaagcctgtgacccctcagagatccaccactatgaatctctatgggattcccatgatgtcctatgggaggacatcagcggcctaacccagcctctcacccaaagcaggaaaccttctatggcctctcagacatggggccacccagtgtcatgacaatgtcattccactcctgccctccccacctccctgtgctccacaggaaccccaacctgaagactctcttgtctgtcggaggatggaactttgggtctcaaaggtaggagcctctccccaggggcaggacggcagaggatgatggcataggagtgaggagcttgggtctcccgcatccactgtatggatgttccaggggctccagactagataggtacaaggcctacctgtttgtcaagggcctgcctgatgtgtagcaaagaaagcagagcccagagagagagcaggacttgccaagagtcacacagcaagttaacagtggatctcccaattccctgccaatgctctatttactacctcacaggcccgaaaatatgggacttctggggctaccaccattagggctggaaagagagagatggaaaccaatggggacattgagaagtggggagaccctgggaggagtctttggattaggtggggttggagcagggcttgaaatgggggtggttatggccatcgttggcacccatgtgctgggtactctttctgtgtccagcaccctgtctccccatgatcccatgttgtcctcacaacagcaaggtgagctgttatatttgtccccattttacagatgatgaaactgagactcaggttataacctttcacagtggctggctagtaagtgatagagccagacttggaaacctggaatgcctggctctaaggcacatgcatgcctggaggcgacccctgtcccaatcatgccctcccagagctgtgtggcctcaggatcccagctctgcaggtcctggaaaccccaccagaggcccaaggcacctagcatatcagtgctgagcatgctacagggctgattttggtcctagattttccaagatagcctccaacacccagagtcgccggactttcatcaagtcagtaccgccatttctgcgcacccatggctttgatgggctggaccttgcctggctctaccctggacggagagacaaacagcattttaccaccctaatcaaggtgctggtcaggtcagggacagggagggaggtgggcaggcatgagggaatggggtgggctagaagccggcgtcagctgctgtcctcctgaggacaggtaaagagggacttcagcctcagggcagtgtcctgggaccctgtgccctgaagatctcacatagcaaggaaggcttcttgtgaccatggtgggaggtgggaatggggttctaagaggtggaaggttgtgactgagcagagcacccacttataactacccacttagtgcattgcccattgcccacccttcaatcccatactgatgccacccatacccagcatgcactgtgtccagcagctctcagctctgcctgggggcagcctaagtatctccagttaccaggggcagaaggagagtctaaacaaattgttcacaataccagcagcaatcactttaactttgggatttcatgcaccagctagaacaaagcacagaccgaaaggcaaatgtctcccaaagtcatctgtgggccaataggggtcacccactgtccgatgctccctccaggacagggagtaattgagtgctgatgggtgtgcatgggtttggggagaagattagtcagttttttaggaaaaggatgggtgacttgaggatgggaccactgatgagccactttatcacttccactaggccccaggcaggttggggagtacagcaaatgggttgcgcagagacctagtccgccctcgatgagtctacctctcatgccacttgggaccctttctctcacctgcctgtctcccatctaggaaatgaaggccgaatttataaaggaagcccagccagggaaaaagcagctcctgctcagcgcagcactgtctgcggggaaggtcaccattgacagcagctatgacattgccaagatatcccagtgagtctcctgccccaggcagcctccccagaacctctgccaacactcctgtttccccgccacccccagccctagcactccatgtagactgaggacactgggcttccagtcccagttcttccaaagccttgatgtgtgaccttgagcaagtcacttccctgccctgtgcctcagtttccccatctgtcaaatgaggcataacaatccttgcctttcctttttcacctgggctgttggctgagcagttgagagagctgctatgaaagtattttggaaagggaagtggaaaaagctattcaaaccctccagctattgcagagtattttctccacaccaggcagagcagagtgctgggccctggagaggccacacagcagcctctttctagagtgctggggagtcctcaaggctctctcatacacacaggcctccccctttcctgttggccccacgcctcatcctcaccccacccctcatgcctgtgaggaacaaggaacagccaagcagcctcatctctcctgagagcagagccatgggtctcgggaaacccaggagtaaggaacaaagactcttcaaaatgacttcagagctttctttaggatcccagggaggtgtaaactcagtgcttaattaaatggattctttagagggtgggaaacaggtggatgtcaaccatttgccccacatacccgtattcatgcaatccacccccagtgggctcaccggtgcgggtgtgcaaaacctcctcccaccccagtcatcttaggttcaggtcatcctttggtcctgctctttccccgccaggctgtctgttgatgctacttttaatctgctttcactaagataagcctggcagaagtggtgggggtaaggtgggctgtaggccagctcccaaatgtgtgctgggcataacagaagacccattcttgactgaagtgcccttgtgggaccctgagcccgtgccctggagtggcacagggaggtgtgccagcaatggggaccgaggtcactggggactgctggggttcgggctagtggcctgtctggctgctgtctgcttccctcgttcacatcctgctggagccttaaataggagcccaaaagcttttctttcttacttttttttgagacaaaatctcactctgttgcccaggccggagtgcagtggcacaacctctgccgcctgggttcaagcgattctcctgcctcagcctcccgagtagctgggattacaggtgcctgccaccatgcctggctaattttcgtagttagagtagagacggggtttcaccatcttggccaggctggtcttgaactcctcacctcatgatccacctgcctcggcctcccaaagtgctgggattccaggtatgagccaccacgcccggcctaaagcttttctattaataatttcctgcctcaccctccatccccttcctcctcagacacctggatttcattagcatcatgacctacgattttcatggagcctggcgtgggaccacaggccatcacagtcccctgttccgaggtcaggaggatgcaagtcctgacagattcagcaacactgtgagttcccagaaggagggagggccaggagggggccgcaagacctgccatctgccagtgctcacacaccaatctctctagccctcagtacagtcctgcaagaggggggtcatgaggcccattccacagataaggaaactgaggcccaaagtctgggcatgctgcgttgctctgggaaggtgatctgcagggtaaatggagtgagggcagggggccgaatggggagaggctgggagccgaggaggtaggagtcattgtgccctcagagccaaccacctgatttctgcatctgtcaaatagtaatagccccttcctatgcctcaaaggatttttttcaagaatgaaactgtaaaattcactttaaagtgacatgatccgttcccggagggacaggggaatccccagtgcaccatacaccaataacccctgctaaggcagcagtattaattgctcaaccttccgcacctgtgcactaactgctcacgttgttcccaccctaccccacccaggactatgctgtggggtacatgttgaggctgggggctcctgccagtaagctggtgatgggcatccccaccttcgggaggagcttcactctggcttcttctgagactggtgttggagccccaatctcaggaccgggaattccaggccggttcaccaaggaggcagggacccttgcctactatgaggtaatggagttggggagaaggtaggattcccccacaccaccagcagccctggggaaggtgattccccaccacgttcttgctttttctcctttgggaataaagaaaatgtccggttgccccagcatgcctgaggaagtggaagggagaggttaggacatttgttgctgaaaatctccagcaggtacaggcacatgggcctgcaccactaggcacctgggatagccctctggctatggggctgaggtcttccttccagcccaggaaagagcagaggtcaagaggcagattttttgtttcactctagcctctgctactctgtgtggccttgggcctgtcctcagtgtcaaccagcaggcctcacatctctgtttaaatggaagaagctaagcagggccaaggcagccaccatctctgggtcatttgcctctggtttgtataaacttgtgtgatgcatgcagcctgcagaccctgcagagagtgaggctgcaggatggagcaggagctaaaagagatttggagagtggcgtctcctggtgacctgcaaggtctcggcacgactccccacactgccttttccctgttatctgctcagatctgtgacttcctccgcggagccacagtccatagaatcctcggccagcaggtcccctatgccaccaagggcaaccagtgggtaggatacgacgaccaggaaagcgtcaaaagcaaggtaggtttccccaaggccacacctcaggacaaagagaaagaaggaggccccgctcccagcagccagattcctgtcccttgcactgaggtctgggctgggctcacagagcacatgtgccctgtacacactctgggtcagggaacccagccctgctcctctgggcctcccctgccaggtgcagtacctgaaggacaggcagctggcgggcgccatggtatgggccctggacctggatgacttccagggctccttctgtggccaggatctgcgcttccctctcaccaatgccatcaaggatgcactcgctgcaacgtagccctctgttctgcacacagcacgggggccaaggatgccccgtccccctctggctccagctggccgggagcctgatcacctgccctgctgagtcccaggctgagcctcagtctccctcccttggggcctatgcagaggtccacaacacacagatttgagctcagccctggtgggcagagaggtagggatggggctgtggggatagtgaggcatcgcaatgtaagactcgggattagtacacacttgttgattaatggaaatgtttacagatccccaagcctggcaagggaatttcttcaactccctgccccccagccctccttatcaaaggacaccattttggcaagctctatcaccaaggagccaaacatcctacaagacacagtgaccatactaattataccccctgcaaagcccagcttgaaaccttcacttaggaacgtaatcgtgtcccctatcctacttccccttcctaattccacagctgctcaataaagtacaagagcttaacagtg

SEQ ID NO: 223 - DNA, 63145 bp, Homo sapiens
ctgaacctccctctgggctgggcacgcttggactcctccaaagagcttggaccagcctgagccacatccctgggcttgacttctccagaacaagcctcctggtctttctgggagagctctggcagcatcactgtgcctgtgcagggagagcgggaacccacttcctgcaccggctttctctgagttcttcaggatgaattcgctctggtctaggtaagttctaccccgaggccaccttcacttcccaaattccagcttttccttctctatccaaactgttacaaacacagtaacaataatttttaaaagctttttttttctctgaacacactaagtccctgctaattactgaaactccaggcattacaggaatatgtggacacttaaagaatcaggactacgtgggagagggggaggcagctccccagggtcctgggttggcacacaggctccaccactgtgtgactttcaacaagcgacttccttgaccagctgcccgctctgtaaaatggggagagtaatattcggccacactgagtcggtgtcaggttgagttaatatttggagagtttctggcacaggtaggtgctccttaagtgcctgttaaataagtgaagctttgagaaagtgtctaaaaggcgacacactaaatttttaagaggctggaggtgggccagggaggggaggtctcttatgtaatattttaatatctttttaaacctgaagaatgtgttcttgtagcactcctgtaattaaaacttaatgaactaaaagtacacccctcctgctcataccccttttgaactccgcagccgcgccccccagccggaggccccttgggcagcagacaatgggtgtggattcgccccaggtcccgccggctggggcggcgacaatacaccagtccccgacagctatttacatgacaagggcttccgggcgtgtctacgcgagttcccgtctttcctggtcgtcctccttgggttcgggtgaaagcgcttgggggttcagtgggccatgatccccgagctgctggagaactgaaggcggacagtctcctgcgaaaccaggcaatgggtgatccatcttgggggcttcctccccctttctccaatttctcttccctgagcccccagggaccttgtgctcctcagaagataggctagccccaagagcctgggtcaaggaccccagggacgggggcgaggggagggcgcaccagcaacccgcccgggtgcggctggcaccgagttcggctccccggccccgggcgtgcgccgggcaggcgttccaagctgaccgccgttggggagagggcacagcgcccctcctccgttgcgcgggtgccgggtctacgtgggccgcctagctctggccctttaagagcccgccccgtttcccgtcaccccgccccccggctcggggagggggtgcgggggaacctcggcggggattggcgcagcgcgcgccccctccccggcccccgcgcggtgggaaccggcagccccgtctagcgctgacgtcagaccgtctgcctgcctccgaccgcggtctcggagcgaaacccgatctccttggacttgaatgaggaggaggaggcggcggcggcggcggcggcggaggcgctcggctggggaaagctagcggcagaggctcagccccggcggcagcgcgcgccccgctgccagcccattttccggacgccacccgcgggcactgccgacgcccccggggctgccgaggggaggccgggggggcgcagcggagcgcggtcccgcgcactgagccccgcggcgccccgggaacttggcggcgacccgagcccggcgagccggggcgcgcctcccccgccgcgcgcctcctgcatgcggggccccagctccgggcgccggccggagccccccccggccgcccccgagccccccgcgccccgcgccgcgccgccgcgccgtccatgcaccgcttgatgggggtcaacagcaccgccgccgccgccgccgggcagcccaatgtctcctgcacgtgcaactgcaaacgctctttgttccagagcatggagatcagtgagtgaccccacgcccccctccccggagactccatcgggctcggaccctatgtcggggcacagctgcgagcgggggtccgggccctgcgcgccccctcggaccgaacgccctgcgcccgggcagcgcccgccgcgccccgggcgcgccctcccggctcgcggcagctggcggccggcccggctttgtcccgcggcgctgcgagcctggcacggcccccgctgtccgcgccccgcccgcccggactcggacccggggctcagcggcggcgcacggcgcgggagggttggggcgggcggatccgtgaagtttccattttatttccctgagggcagtcgcgatggagcatttaggccggctctttatcaactttgggcgggggtggaggggcgtgtgagacactgtctggtctgcgaggtgtctggggctccgggcgtgtgtctggagtgttcgcggcgctgtgtctcgggctctgagtggatgtccgtgcgtctgtggagtgtgcgtggctgcgtggctctgtctgggtcttcggcgtctctcggggtgtctgggggtctgagtcgcggtcttgcccaagagtgcgtgtcaccgagtcttcctgcctctctctgtgtgtctttcccgtgtccgggccggggtgcctttcttgagcgtgtccatctttctgggggtctggtctggttgggccggatctggggaccgtgtgtgtccaggtgtctgaatccagggctcagctctggcccgtctggcccagcgtggatcttgaatgtgtgtgtgtcattgtgccagtgtctgtgtccccgacgcacctataaatagcctctgtctggacagcttggttcagtctggctgagaccatggttacaaaggagtcaaagtttggggctgtttgtgtttgggactgcctggccctaaataagggatcagtggaccaacggtggggagtggggttttgaaccttgtcgctaacgcagccgcctgggcacccaaaagttcagataagtaagtctctacctcctgcacacacagcccacctaggtggacatttggttgagtggagaattgaaccactacctcccgggttctggcttctagcttctagcctacaccttgtcccccagcccaccttttcggggaccttttgcttccctgagctttagtttccccatccccaccctgaagaagcacgccaggtgaaggggcacacagtccttccctgctgggggccaggctgcccctagctggggcccggagctgagaagcagccgctgtggaatgaaggcagtgtctgggcggctcataagcaagtgtccgcaggcggctgccagtttgtggcccctgagcctatacagtgagcttcaagtggtaaaaataaccaggctggccgggctttggtggtgggtccttccatccatccacctctccacactccctcccagcctggaatggaaagctctccccctaccccaccttagctggcctgtgccagactagcgaggtgccaggaggacctgcccagagccagcgtttgcggaaccgacttgccttcccagaggccctttgtgaactcaggaggctaatgaaatgcacgagaatgttattaaaatacgttcgcacacgtttggagagtcttgccttagatggattgctgcttcagtgccctccttgcctcactttttgcctttcgctctgtaaagctgccttgaggacctcctgctcgaggggcacacatccttgtgtcacccttattccaagggctgggcacagtgcatcattttgctcttgtctctctttatggttcaggacttaaaaaaaaaaaaaaaaagcattgttcttatttctgtcctttcttaggctcatcagtccatgatgtttttgacctgacatcaaggcctcttgttaaatgccttgccgccgccctctgcactttgccccgccgccgccagcagcctttgagtgattgggacccttggggttaatacctggaaccctagcctgttccagctggcccctgggtgccccagttagtcctgtgttctgtgtatacacagccccctacttattggaagaaagctgcaaggcacggagggaaccaaccagtctttaaaatgcaggtatactgtaacagtttgttttcatcagatttccccgagagactagggtgaggaagtggtaaggcctggtgtctcctggagtttctttacaccaaaagataggaaggaaggagggaaggaaaaaagaaaggaaaaaagctagtatttggtttttcttttaactagtagtggctgctgtttttcatctagtacatgctgggagttgtttgcaacgagaacttgatggatggtttggagttgggctttgaggcagtgtccaagtggctcctatcctgtaagataccttcttttggcagaaggaaattgaccttgctaggtccttaagccatgatgggcctcactgtcttcatctgaagaatgaggccgtgatggatgaaatctagaattctatagtctttcaagatagggcctctcccctgctgagcctggctggaggtcttcaggctggaccgggcttcccacccactgctggttcccctgtgtggtcttcagctaccccaaatttcagacctgagaggagcctacgcaagctcggggttcacatccctgacttacagatgaggaaagtccaccgtggaaagttttgcccgaggtccaaaacccacaccagccccaggccagggtggtttctcttggactgcacgcccacacctcttgaatttggtacttgggccccagagcaggtcctccttgaaattgggggctgggggaaattgtcagagcccctttgtacgccgggagccacgtctgctctcaggatgctgaatggagtgggcttgactgtaacaggacactcctggggccccattttttctgagagtcgagggatgaggctgctgtctggtgggaattcagtgttcccaaaacatacccgtgggaaaaccctttcttttaaaaagccaagggtcctgggattaaaagcaggcagcacgagtgacagccttgcagatgtcagcctggagcttgaagcggctacttttgaggaaaggactcctggcacctggttttcctggcaacctcatctacctcatttcagttctgctgcgtctcagagattacccccggtctttctcctctggttattgcctcaaacttctggggcccagatggatgctaagttcgctctcgggaaagactgaacctggggccacccggtgtctgctcacgcgggaggcgtttcctgagagttctgggaggtgcccctgccctgggcccatctctggtggtatctacggtggcagctgtctttttaacatcacccactggccagagtcaccgagcctctgattcttcttctccaaccttttccaaacaaatatgagaaaatatcagaaactcacaggacacccaggtttccctgggcttgcctggcacatgctgtttgacacttgcttgaatcaagtgagggtgtagagacagtgccttggcactgtgacattctgagcccggtaattctttgttggggggcaggaaaggccgtcctgtgctctgtaaggtgttaccagcacccctctcccacacccactagataccagcacccctctcccaggtttgacagccagaaatgtctccagacatggtcaaatgccccctactgagaccactgtttaatcagttagtggtttctcctaaggggcttgagggccagagggcagcatctgcgttgccaggagacccttaattcccgtcagacgttcgtccctgtgaaggcctgtggccactccgcagccactcatccactcagcttttactgagtgcctgttgtgtgccatgaaggaaagataggggcttcctcttgagatgaagttttcccgttttcgtcttggatttgcttttctaaggagagaccctggcgttagtgaaagctgatgttttggattggggttaaaatacagatgtccaacaccagctgttctcccctgtggacccgctaaaccctgggacttttcacccacaggttttctgactgtctgggttttaggttgtggtgcaataggggagttattaagggagttgagttctatgacccgaatcttaggtcagacagttggcctcagcttcccaggaggtctgggttaagccagctacactgcccagtgtgacccagggtcgaggtgagtttagcatttgtcaaagcacaaaataactaattgttcctgtacaaacacacacgcgcctgtgagtgggtgcttgcatgcgcacacgtgcagacacacacacgcgcacacacagtcatacacaggcacacacagcttctaccccatctgtctttcctgccctcttctctttgggttgggaatggttaaaacttctgggcatgtaagaagaaaaggaggaagagtgcacattctcccctgtaagaggtgcgaaggtatgcaccctctccataaaagaaggaaggtggacccctgtgtgccgctgcccaggagaagggaggccgtcgggaggtctgtggaggctggaagcgtctacagcagagttgcctccctcaggagccccaaggaagcctccatgctgcaagatgcacccgccaccaaattgccccagagccacggggtcaggtgtgcccacatgcctgcccccaccatctccactcccatcgtggcccagggccagggggtttaaacgtttatagtccggtcaatagtttaaaagccagaaaatgtttggaggaaggtgctggtggcagggtccaaacctgaggatcggtgtggccttctctcttcaggtgttagcatccagagaccaagtttgcaggcacctcggtgtctgggatcctgcccaaagagaaggaactcttacacggtgaatttcggaggctgtgctgctgccagcctcgggttctgtacggtgcacatgctgagagaaggagattgaagccgagggcccattttttgctttttacaaagtgttgcgtaacgcacgcatggttggggcacgtgcgggagctgtgcgggagacggacctactcttcatgcaccctctggagtgacaaggatggtaccatgctgtgccaggggctccccgaggctgggggagcatggttcagggaagcaaactcagttgtctttggggtgggctccagggaaccaggggcaagagtccagtttaaaggcactgtggccactgctcagcccaccattgccacatgggccctgagtggccagatctttccgttccagggcagccgaatggttagattttgacataaaactcctgggttttaagtgctggcagttccttttgtctcccctgtcaccaagaagccccacagaacctgctggcagaccccatctgtctcatcaagtgacctgccctgctgtgggtgggttaggagtgagaccgagggccagagggatggaggcgtcaaaacttgctggccgtgtcccctttgtgccccccttcactgtcatctgatgggtctgtaaagtggggtgataatagtccctgtgctgagggtgcagagagattctggctgtgtgtggcctagtgtctggagcagctgtgtgttcatagaggtgagcgatgatggtggggcggattggactcgatggtccattctgcctggttccctagcggtcactctgtaacagagtgcctagtgatgagaaggccttcaccagaaaaaggttgcccatcctcggactggctgggaaggttggaatcaacaggcccatctggggcccatggccttgaacatggaggtaattgactatctgtgtaatactccttgtccttgccaggcccaccgcagacctggctggcaacgaccccagcatgcccgttgctggcccaagaggccccagacggtctcttcgggtctgccagcagggttcccttaatccactgccaggcttggtggacagaggctggaagagggggtacaaggcaaggcacaaaactggggccgtgaggtcaacaccgccctgacgtccagatgccccactggctgcagttcctaagacagcctaacctgggagcagaaagcccagaagcttctgatggtttggggctcccctttgtgagaatcaattgaaatttttaacaggtgatcatatgtgggggcaaaccattaaaagaaaggccctgatgtcccccacccccatcaacaggtgcagcgggggagggccggggaggggccggtcttcagtttcacttctgctccaagcactccttcctgccttctccccagggtgggctgcacccctctgtgaagctgtgacagtgccgagtactgacagtcaacctcattttcccgttggatgacactacaaagccaaaccttgacacctcaggggtctcgtcagggtcttgtcaggcaggcactggcagaactgtttgtcaccaaaccgggaaaaatcccagaatgacttaccagccagggcaggggcttcagcaccctggggtgagcctggaagagcttggggcatccccagactatccgagagccacagaatggcttctcttttctgttcctgggttactgatggatttttttgcttctgctctttttcctagttgaatgtgaagagattattatgtgccaggtattagtgacgcatttttctcagtgttcaaaacaaccctgagagagctattgcaccaatctgcggatacaaaaatgggatcagagagtgtaagatacttgctcgaggtcacacagccaggaactgatgctccattgggattcaaacgcaagctccctgaccttgcagtccacactcccaggctttcttttccactacaccgacctcctgagctccagggctttctttgcaagattggccattgcagtgctattttaggctcccaagactgcaagcccatattggaccatttgttagggaagaacacatacgaattggccacctctcagagcaattgggtccattctgctctggcaagacaccggctgacattcattggaaatgtctccccaaaacacacgtgccttgtcaggctgcatgaggagctggtgtctctgtctccagctctctgtgcatctctgacataccagcaccaacagatgtcgtggcgggggtttggggagtagctggggaatgttcccagggaatcaaatgtagacttgataggggacatcactagacacagcctccgcaggggctcagcgttcagcaccatctgccacacacctctgacctccggtgctgttcccagggccgcagaacgtcagggaacgacacagacaaattcctgccctctacgagctgctgcccttgtagggagacaggtgaaagaacacgagtcatttcagaagggaagctgagaggccacactcagaggcaccttcagggcctcgcctagggagacccccagcctggtgtcctgtttggggcccaggagcaccctggccttcctcctgtcacacctgtcatggcagtaatcgaatctttgtgtcattagctgtgccatgtctgctttccctccaggcaccaagcaccgaggggttgttgttggttgtgtccctgaacctggtaggagtctcatgtgcgttggatgaagggaggaagtgggcaggtgaactttcaagagattccagattcttgtggtcaagatacaggctttgaagaccttcattctgggggtgagcgtggtatcctcccgagtctccagttgaccctctgtgaggtggaaggaagaatgacatctgttctatggggttgtcaggaccgttacctgaaaagcacctctggtacaaaatgtgatttttaatgctccaaagtttccactattgggggcaggaaactgtgcccgagtttcatacctgccctctcttctagagctaaggggcaggtacagaagtcaatgcagacccacctcccctgcacccgctccagttgccctgggtggtcaaggtttcacagtgatggctttagtcctccaaaggccatcaaatggcaaaaacgcattgccagagcttgctgcaggcccccagaaggagaattcctagggtgattcttcttggcacacacttgctgcagactgggagtgttttggggttattgtcctcacggaggaaggtggagtttgctcagaggtgatgttgagatgccatatgctggaccgagctaagcagctattgtgactcaacttcggcggtatcaggtggtgatcagctattcctaatgctccagcacattctaatatgtacctgttgttaatgggaatgggggtaggaagaaaggtggcttggaatcagtgcctgccataaactaataaggatgtcagaaagattcgaactatagtctgattttcttctctttttttttttgatgtcttcttttttcttttcttttctttttttttgaaatggagtcttgctctgtcacccaggctggagtgcagtggtgcgatctcagctcactgcaacctctacctcccgggttcaagtgattctcctgcctcagtctcccaagtagctgggactacaggcatgagtcatcacacctggctagtttttttgtatttttagtagagacagggttttgccatgttggccaggctggtctcaaactcctgacctccggtgatctgcccgcctcagcctcccaaagtgctgagattacaggtgtgagctaccatgcccggctccttttttgatgtcttttaactaaaatcatttgttattgtttcagtgggcttgggaaatggctctactggcagaaaagagaattttatttagtaacaagttgaaaatccccagtggctctgggatctggatggtggataaaggttgattgtgacctccacgaaccaactcttcaccatcagcaagaaacacctcgcaatcctccttagcagtggtgctagactccccttgggctggacggccacagctagaaccacctaacagccatgcaggttcgagatgccactttgccttttaagtcttaagaaactgtcctatatcatttgcccccactataggcttttggggcttcaggggaggtggctgtgccaagtgcttatttgtgttgataaaagttgcacgatcttggcaccaaatagatcaataaacattttgacagttggtggaagtggagttattgtgtacctcagtttccctgttcccccgaacatgttcggtaaagcatgggcctgtggaggggtctgtcagtggcagctgtcagcctctattgtcattgacaggttgtcatggattcccagtatgcaagtcgcatcagcatcaggagtggaagagtctctgctggtccttaaggtctccaggaggggccagttccatcactggctttgggagcatgaaagtgacaaatccagccatgaatttgcctgagtgtcagtggttaagaatacaaaaaggtgtgtttttatatttagagccacgtatcttcaagtatatacaatatacatttgtattttatgtatgatatatgtaaaacgcggactgtcgaaacatgtgcgttccaaccgccgaggccgggaggcttctctgaggtcccttgttggagtccaccacggacatcccacctcccacaggtgtgtcacagggtgagctcaggtgagcctgaccttctcccagctttgccccgggttcccccaggcaggtgaaatcagattttccaggccatgtcctcggcagcaagagaagtaggaagctgaatcggtttttcagaaattttgagcaatgcaaactgctctttcccccaggaggttttcagcaccagtggtctcagttgcctagttacccctctgctcatctagaccaaatcccgagagactgccctgcaccccacacgccttgcttggcctgtggggcagtcctggcacctggtagttgcacagggagagagactgtggcggggtcctggggctctttaacatagctcagccgctttctagatgtggagtctttggtcagctccttactctccctgatcttggctgactgatttataaactaggatttataattactgcacggaggtgattaaacaaattgtcttttaagcacctatcacagggctaattcctagtagatgctcaataaatggccacgagagtgttggtgccgatggtaagtagggattggtggtaagcaggatggctgcccgagagtgtgagctgggcggagctcaggttggctccttcttgcatcaagctgcccactaggcttgcacatccttgatgtgggcaacacccacagactgcacaagctgtcccataaggttcagatgcccagacaacaagattcggttcgagccctgtggggtgatgcattccagagaccacacttcctttagggaggctcagaatttgcatggggccacagcaaacgcctttcttcattcccctgagttatacagcaggtagcagagcttcaatctgaaacacctcgtggatgtcagttgagagatggcgtgagagtttggttgtggtcagtgatgtgcttcagactcccagagaagggagactctcaatgtcctcttatggctgctacatttaaggaataaaaaataaaagttaatacagagacttgccaagtctgtgtgtgtgtgtgtgcctctatatgtacgtgctgacttcttaggatttctgcaaggtccggaacagctttccagaagaaggtggaaagtgaagccggggagctttgcacaggtctgggaaccctgcaggaacttggtgcccgccgcgccagttccgcagattcccctcaccgggctgagctgatgtctgtagctggccagagttctaattgccttcctaaaaacaatttagttggtaataattctgtaaatgtctgaatcaactttgcgcaaacaccctgagtaatttctttgttcttttctttctactttgtaattggtgtctgtaaaagccaaaggtttggtcttgcggaaggcatgattcatttattggtgtctatgcctcctcgttattgagtcatttcagatgccatcacggtgagccagggctgattcatatggggctgagcttagaagccaatagggtcacggccataggaggaagctggttttctaatctgtttatgatatgggaaaaagaggcgggtgtattgagatgatggagagggtgtcaattacatgggtgaatataaccaatgaaataacaccaaccagcctttaaacaccactccatttgctgctgttgatcgttaggatagatcgcagctcaatgcactcctatctcgggtgtatctctccctgtgtttatggatcttgatctctgagcaggctgacacgggagggatgcccccaccccagacctggagagacgtttcaagtcataagccacagatgcagagaatgttgcctctttaaaaaatgtatcagctggacctaccatgaaacaaatgtttaaatgtttaggctcacgtgtaagggagcctctgccccattccctactcatttctctaacaatgacaattattagatgtttgcggttgttcgttctttgcattattctccaaactgtgtgaacttacacatggtgccacttattttgcctaattttattagttgctttggccctaaattgtcactgtcctcccgtctagagggtaatcagagttgtttgccacatggcccagaggtgtaattatgagtccaaattccaactgtccgtataaatctaggctctgcctgcaaggggaatatttcttcctgcagtgctttcctctggttggttccccatctgcatagctgcactgcatcctccactctgcatcggggaacaagggtctctctcaggtcgttttcaatatccagctcctagcttagggccaagtgcaaagcgtgtcattggtgtctgtctagctgctggttggatggctgtgagaaagttcactggaggagaaatttgccagtaaccctgtagaatccagccagtatttattgagctgcctagtgacttccaaagtatagatgagggatgttgagtgcatggcattccatccagtgtcccctacttgctgcccataacagacattgctaatcaattgcaccctccatccttgctgcactcagatcctcaccgaggtggtactcccagtgtctgctcccagtcggggttcagagagggcttgagtgatgacacttgttgaccatcgggttgtggatgatccttatggggaaaactggaagttgtgcagacaaatggctgactgaaagactagtggggctgcagaaatcctggtgcatgcagccaccaggaccaactcccatctgctcctccttgtcaccctgtgtgagtcccaaggcagttccttccatgagttctaaggacgttccccatctgtagatggcccagccccacacttcagctaccatgtagcgggaactcccacacttcagtgaagcagcatccaagggtgactccaagagcaagcctccccgaagagcatggctgcccggagtaagcattactccttggttccttgacaatatgtcattttccttttttaaaaatcaggggtgtaaacggaaatgtgcacagaggcctccattttctcttgccagcctctctccacagaaatcttgagctctgctctgagcgcttcgcggcattccctttcactctagtgagaatgagctctggatccttttcccagaatagactcagagcggagttgagggtggggttcaggaacaaagacaagaaaggggagaatctgggaggcagtcagtatttagggaatgaacccaacacccaacagctttgtctccttgtttttctgggttcttgccggtgacgtcgcggctttttgaaccctagcaattcctactgacagtggcaggtgctcactgagctctttgcacaccctgtctcactaatcctcatggcaaccccatcgcatggaggaggtggagctaagtcacctgccagggattgcccagcacaccgcagagcaggatttgaacttgggctgcagtgtcttggcacagggtgggagggagagtcacagagaagcgggaccctttgccagcccatggttgaaggggaaagttctagacacaaggttttcctggcattcctggagccccaggggcgcccaggctcatacctctttcttcctgaagcctgtgcctcatttgtctaggcagggacgagcccaccttcccctgagcctcagaaccgcctgtcacttggtttaagggatgggctggttgggggcctctgctccttcctcctcctcccatcctccacacacttccctccttggaagggtgccagcagcgatccctggggctcagagcaggagggagcagaaattgtcggtaacaggttgcagctgaagggagaaagtggtccctgtgaccagtgaggtgcttgggcaggatctgagctccccaggaggggtgaggagagagtccagagaacatctggactggagggaccctctctagccttcttcaaaatgcagtggttctcagtcctggccacacattaacaccacctgaggggctgtggcagcaccccagacccactacctctgggatggggccgggccatctgggtttcctaaagctccccaggtaattccagggtgtggcagagttaagcccgctaagctgccctcagccccaagcttgcagatgggtaagttgaggtctggtgagggggaggaggaaactcaggccacttttcagccacaaaatccttctggtgctaatcagaggagtactgctaggccaggcccagtggctcacacctgtaattctagtagtttgggagatgggttttcaccatgttggccagactggtctcgaacttctgatctcaattgatcttcctgcttcagcctcccaaagattacaggcgtgagccgctgcgccgggccaggcctgcagttttaagcagggcagacggattgtgaaagggccaagctgggctggaggtccgattctctagcggtgaaatgccaggtgcttcagcggggaaaacattttgtaacctgaatctgggcccgtaacgggtaccagagacctgggtgtctgtcccagccccagccagggggcccaggatagtggcagagccttggagactggacagactccagcagctctggggctgggttggcccatcagccgctgttgccagccccgctgggctccagcccagagccaccgcctgcccgcctcacctggcctgcattcctttgcagggaatgaggatgtgggtgaccccagacaggtatgaatcatgtcttggggaggtggttactcagaggcggcaaacgccgaggctgccttcctcccagacagcgtggacctcagtgtggagcttcgtgtcctgggcttggggcatggctgctgaggtgggtgtttgaagggcctcattggagtgagatgggctgacaggcagtggtccctctccccttgactctagcatgctctgaagaagaagaagaaaagagcagtgtggctgtggcaccgggataccaggtcacagtcatggcagcctcacttaccggctttgtggctctcaggcctatttttcatctagagatagaagtgctgggaagcagtcctgacttcctcctgttgtgagggcagcatggacccccctccccttatttcctgaatgcctaccatgtgccaggcacagcaccacatgcagccctgcaagagctactagacttgtcttacatggcgctacatgcaaccctccaagagctactagacctgttttacagataaatagactgaggctcagagggcagaagtcaattgcccaagggtgcatgactcgtaattggccccactggatgtccagcccactgcacccatctgtgtcctagccaccctcccatgtcagttccaagaaatctataaacccgaagcaaacggtagcacatgagaaaactggagatggcacgtggatggtcatttaaaatttaatagttccgtactcatgtgaatgtatgttaggaaaaatataacaagcacattgtcgatttcgtgagtattattgcttaagatcgggttaagtaataagtaaaccaattgaatattttatttcagttgaaaagaaaaatactgaagaattttaatgcctttaatggggtacttgagtatggcaaaaatcgggaaggctgagagtgtcatttgggagctgtgtcccaagtccctcgtgggcctttaatcagcagttacagatctgcagctcctcctgtaggatggaagcactttgctctttggccttttgaggtcacccagctatttgaaggtcaggggcaactcgattctaatgagatcaaggtcacagggtcatgttgcccccaggaaagtgggagatggagttctgtggtccaggctgtggccctgctgcagggctgggaggtggagaggtgtggacagagaaggacctcccatcctcaccggcagagaaagctcagagatgctcccagctggtgatgaggctccagcctgaatctcagcctgctgctgatgatggagaagccagcacttcactgagtacttccttggtgccccgtcaccacccaacacctcctcacaaggcttgcagaagagcctgctgagactcagagtgtctgtatcctgccccaggtcgcagctgtgtggcatcctgatctctgtgtattttaaccaagatctcgatgttccctttttgtaatggaaaaaaaaaatctccttaatttaattgttctgtgatgtctgaaatgggtggatattctgcagaataggtctgtgacttattatttagcctcctcatgtacctttttagctctggggagaaagacaattggaagcaagtgaagaaaagggctcaggtgtgtcccagccccaggccttgcagttacacctgccacctgctggccgccaccgtctgctggcccccaccttcgacttttactgctaggaaaagtcccggggcggggaggtgttggggaagttctgccgcctgtctggcttgtggtttggcagaccttcctggatgcaggtctcggatcctgggcttgagtctcatcctacaagaactagggggaaaggtcgaggaggcagctcctgagcccactggctctgacttgtgtggggcagggagggcacttggcactctgggcctggtctctctgctcatcctgtgggcctgcctcctacctgactacctgtctaggaatttttatggcagcccgcagaggtactgcaggtcggctggaatgtgagatcctggccctgggaggcgtggggtaggcgggcttcagacacagctcctggctgctgggcaggaacgcagagcgaggcggccactcccggcctgctcacaacataagcgtgaacatcgtggttttgccacttcgggacttggctgagttttgccacgtttccttatgccctgattctgccaggttaattctgattaggtttcggtttgaccactgcctgggacaccttgacccacagcagggattgagataaacagttgattatcatgagttgtgaaagatggaaaatagtcctattaccagcagcacttaggcagccccctgctccctgagacattgctgagtgctgtcctgtagaacagaaccctcccacttagcctggcctggatctctgccttttctttccacaatgaagagtatccaggcaagaggaggtggacggaggttcctcaggctccaggtgaccatggcttccacaagccgccctgccagtggcacccggctggcatggggtgggacagccacttggcctcctctgcatctggcagcctcagccctcgaggaattgaatcctcctggggccaaaagtggccgtgctcgtgacccgccagctgcaggccaggtacagacctgggcccttggaaggagcagtggcctggcagggaggggcttcagggggaccgggctcaggagtactgggcatcctggtcatgaggtgggagcttcgctcccctgtctgggccgccctgtgagttcctgccaccagccctgacagaccattgctcacctgcccccatgactcttcccacacctggtgggctgtgccttggtgcttgcagctgcccaagtccaggggaggccacaccccatccatagggagtgagtggtcaccacgtaagagtgtcctcggggttgcgtctcctctatgagcctctgtttcttcatctgtaaaatggggattgtaataggcacccactacacagggggcatcgtaagaattaaatgagacagtttgtggcaagggctcagctcagtcctgggtgctttgtaaatgctcgagaaacaaagcctgttctgtttgtaagacgtagccagtattggaggagtggtggctccgtaagccccgggacctacccgtgaaaagggagaagagggtgatgggatgtgaaaagttgggaggctcgtcggggaaggagatgtgagaatgaggcctgcagtgtgagtaggagttctgcccagggggaggtttcaggaagcagcccgtcccaggcacacccagggttctgtttcccctctctgcagatggaggtagttgttcaagaccacacagcgggggtggctttggaacgagggctgcgggcaccagtgaggtgggtctgagctcctctgtgagcatgaaatggacagtctggaccgggagatggtgcacccagccttagctcgcagcttcttcctctgagaggggtgagagtgagggtgagggtcctgcctcccctgtcctattcccacctctgctgcaacctgtgtaaccctcaacagcagagtaatgattttcttcgggggaaaacgttctccctaccccatccctgaggaagcaggaaaggagttttggggagtaggagctggcatcagctcaggggagaggagcggtgccagtggtgcctgtccctggggctgctatagcctggacaccttcgccctcctagaccagcccagagactgtgattcaactctcagtcagtctggggccttgactggtcctcggtctgttcctcctctttcagagcctgcacaagaacccctagcgcagcccctctgctggagggaccttcggaagagttggggagaaggaggctcccctcatgccatgttaatgggaggggacaccagaaggctgggtggcatttgccattttgcacaattaggaacctcgctaatgggtaattttactcaatatttcacgccattcatgaactcatctgacacattcattgagcacctactgtgtggtgggcctagtgttttggacacacacaaccgtgaaaaagacaggccagctcctagtgtggcagactggaaatcggccagaaaaccaatgactgtagaacagcttttcagaagtcccgtaggaaaagaccgaggggccggtagggacgaggaggaggcaccaggaccagctttctctaaccctgcttctctggtagccttgtaagcgggatccccaggcctcggggtgtagaggcatcagcgtttatcaggcgcagtagttctttcctcggatgtgagctgaaatggggcgagtgcaggaacctgcatgctcacacattttctcccaggaggtgcaagttccagaacccccggctcctggatcctcaccaactggtgggtgaggagtagacggccaggctccaccccagacttccggcaggtgggggtcggctgggcgtgtcacttacaaaactcagaagaagccagatcttcatctgcaccgagtgtttcccaggacagagcccaagcaggagaagcgcaggctggggtgcgcgcctgctctccaggcccctgccacctgtttgcacatgaccctctacacccgccatagcaatggagaccccgcctcctgctacagttaattaatccttcttttttgcttcacaataaaaatagcatggctcttctgattgtaaaaagtgatatacactccttatttaacgaaaaattcaaagaatttgataaatgacaggcgaaaagtcaaaatgcctgcaattccagcacatggaggtaagtttcttctctggggatattctcaggagcatttgcatgtgtagcgctgatgcagggcgggtggcagtggtgggggtgggtgcaggcactgggcccggcccccccgggtggtctgtgccccaagccgctgcccagcgtctcttcgctaagaggtgaggtcagaggcttgcttgggaacctctctggcctccctgtcagcccagctggcagaggcagggagggttccacatggaggcccccaggctgaaagccaggcaggtgggaaggttagatctggctggctctgccttcacccaagagcctcgtcctccttatccataaaatggggtgacaccgacagttcctagctcgtggagctgaggtgaggagtgcatcgggtgttgggagaagctcagcaaatgcctcgcacacagtaagtgccccatggacctcggctgctgccgggcgatgcagccactggcccctgggacccacgtcagccccagcagcgccgtgtctgtgtccctccgatatatagagctgctgaatcagactttgattcacaatcaaaggcttctgtggtcaaacacgtctgaaaggccacagcctctctttttacgacaggtccctgagacccagagagggtgagtaggaggcaggagcatctccccatggccctgggaggcagattcagggcggcccctgggtccccttgtccccggagctgggaatgtacttgaagcttctaagctgatcatcatgagaaacagctatttatgtgggcacagttgtgaggactctccttgaactagttcctttagcgacgggcaaagaggattccccgagtttcatttggagactgtcccatcttggcactgacctaggtccgattcccggtgctgggtccgatgctggactccccaggaggaacggggtggtgtctgttgccacagaggtggaccaggccagagtcacccctcacctcgccccactccccagccgacctttctgcctgggaaggccaggcctctgtcctggtcacacaatacccccttctcacgttcagactggcggtctagacactcatgctccctttgttccgaagggtcaggagttgggggagggccccagaaagtgggatttgggccgagatagaagagagggggtgggtagtgggtgaggggaaactggcttcaaaggaggcggccagttctccctccgcctgcccagcgagtgaccagccctaccaacaaaacgtgcaccaatttctaatgatagaggcagctcccaaacagaaacgcgttttgaaacccaatcaagctgacgcccactcgggcccatgcgcccagagctgtttagctgacaccgtctaaataaaaccccacagcctgtgccaataagtctggggcgggctgccagcggggatcgaaggcccagaggcagcgctcagccaggtctgagccaaagaaacccctggggaaagatgcagaattcccacccccacccgctcagggaatgctcaccatgcctgggtgcctcgtaaaggggaggacaggcgggaacatccccgaagccaccttgtcctcatggccgttagtgacaagaagctccaagtactgacccaggagagaggcagaatctccagtttgattccctggctctaggcttagtgtttgcctatccaaggcctgtacctcttttagcctcggtcgcctcatctgtcaaatgggaatgtgagcatttgccgtgattccttagggagaatgaatgtgaggctctgcctggcacaaagttccctgcctggcagagtgaggtcgaccactgggtgctgaggatgatgatgtggtagtcattcagcccttgctgcctgccgttctttgtggcttcctgatactctaactctggggttctcaactgccccctagggacattggcagtgtctggagactttttggttgtcacaacctggggcatggaggaagtgcctaccccgtaggcgtctagtaggtagaggccagggatgcaactcaacagcctgccatgcccagaacagcccaccccacaaagaagtgtctccttcctaaggtcaggcaggtggaggttgaggaaccctgatttaactcaatccaggccccagacacccccctctccaacttgctccctgcataattactcacatgaggctaaatagaaagtagttgcactgacctgaggaggaaaacggagaaatcttggaatggggagaaacacccaggtgcctactcccctggggaattcaaagctggtggaggctgagctgaggccgtcccgaggcggaggctgagctgaggccgtcccgagatgagggcagaggtagcagagaggcctgaaccacccggcctgaccttatggtgctcacagtgagaggggaagagggaaagacactgaacccagggtggatccaatgtcagggcccgatctagatgcaggttcagacttacttccctggacagggaacccatagactagagagagctcatggctcaggagccctgctgggggcccttgtgggctggaaatgagtttgggcaagcttgggtcagcttggagttgagaagggcaggctgagcagggccctgtagcacaggtgcagaggctggacattgctgtggatatttctggtgactcctggagcccagctgtgtcagttgctccccaaatgcccctgatcttgtcctgctggatttctcatctttcttctgagtattttatcctttcttttcaggtcaaccaccccatgactatgtttggggaagagttggccaaaaaagttgtatttgcctgatggatagagccttcctggtgcagtggggagaggaagctcctggaggcagggctgggctctttgagaaggagtgtggcaattgattagtaatgtcagtcgtggttgccagaccagggagtggctgtaggtatgtgtaggggaagtcacacatgcaaaaagcacctgggttctttcctgacctggttgggttgctctgggcaagtcatgtcccctctggccttggggtccctctgttaaatggcagggctgagtcagtggcttctgggtcacttcactgatgtgctatcttgcggagccttggaccagccccaggcacaggtgccccaggcacaggagatcacctggagaagaaggaagtcgctcagttgaaccccttaacggaaaaagaacattgctccacatcttgaactcattcctccgcgttggcagatcggttctagaacctacacatccacgtctggggcagaaccagaggctgtgcccacagacggcagagcttgtgggctgcttgctgcaagaggagcgaagattaggaacagtcgtttaaaagcaattattaaaaatgagagtgcggaaaccaaaaacagaaatgggggaaaactctgcagtcctctgacatagcccatcacccttttgggaggctgctgtaaggagcagctggagaagtcctctgggtgtatctccctggtgcactgtccttcccacgggattagtgtagacagctgtttttggtggggatcctaagcctgaccatggttttgtttgtggggtgttcactgcgggtccagcactgagctccactctttggtgtgcactgtcatctcctcttcattgcatgggattgaggcaggtacttctggtcactccatctcacaggtgagggccttgaggcccagagagggggaaggagcctgcccagggcctcgctgttgaaagaggccggtggatgccgtgttagtggctggttagtgggtttaatgcacaagggcatttaatcctcacaacagctctttaggacaggtggttgagaccccatttcacagcagggtaaactgaggctcagggaggtgacttcccttggaccacacagcctgaaggtggtggagatgggctttgtctggttccagcgtctgggctttacaacatttgagagagaaaaaggaaggaagggaggacaggaaggaaagacagaggaaggagagcagaccagtctcatatagaagctgccatgagcagggcaggcatggaaaggaagtgaccgcttggccggcaccccatcagagaaaggtcgctggagtgaatgagccctcactgggcatctggcaggcagcaggtctttctctagattggaagctgacagtcccaggggaagaaactagttcccccatttaggagaaccacccctgtccggctgccccggagtgtaacctgaaggagaggtcagcgcacggcttgtgttgaggctctgggagctcctggatgctgttcttcctcccttggaaccttggctgcatggaggcccactccccagtttagagggtgtttgggtgtcaccctgagtgtgtccccgggccacacccttgcagccagcccacctccaaccctgtctttctttcctgggaagggagggtgactcattttatagtgaccctttgtatgagaagggctaaaatgcaaagttggaggtgagaccagattcctctcctcttggttctggtccacccggagcaggtggaaacaagttctcccccatgcattttcatgtaacctttttttgccacacgccccctttaagtgaacagtgctacaacaaaattgctgctactaggtgttagagacatcttagcaggcgccttcccagaacaagaagagccagaattatttgctgggcggccacgtacagtcctattttaagagcgacctggagggcagcccaatcacagatgatggtttctagttctctggagcagccagccccctccccccagccagtccaccagcagaccccaaaccagaccgataacttagcattttcatttaagtccatctgacaaatcgttttaggccgagaaagcaatactgcatctttaaatggctactttgtcagcgcgtctctgtgcgctgtaaaaagtcctttgttatctgtgtctagacagcacgccagcggaatatttggtctgcgtgaggggagagagatctgacaaggttgaattcatttaccggcttatttaaagcgggatttcaaaacacttgctcataaactgttttcggcccagactccccggcctcctcctagcccacactggcttttcttgcttttataatttttcacctgctcgggcagttagctggaggttgcagccgggtgggtaccctggcgaggagagtgactgcggcttgcagcttttttctttttttaattgtcctctttatgactgtctagacgttctgcagatgcacgttctcgggggaaatggcttttccctctggttacagtacttgggagggttgcagacggcaccccctccaaccgtttgaccacccagccccctttctaaaacccctcagccattcttcctctccttaaatgaaggcactttgcctcctggcagcatctttgtgtttataacacatttacttgactgtgctaattttataccatcatcgaaaaaggaaaagtgacattccaggttttcttctctctgaggggtgggcagagacccccccctcccagctcctccccacaacttcccccatttcttcttacagctcctccttttgtggcaatgttttgttttgtggcatgcctacatgcctagacaaataaaacaccagaggttggcttcttaaggatgaaaatatcagggctagttgaatgcgtccgaggttttagttctgccaaatagatgcattaattaacctcattgccatagcgactaggtcattgttaccgcagtgaaaaactggcaagctatgggggtggagggtctcccgggccccccaatcacccatcacccgcccaacaggaaccggtgcagaggccaaataggcatcgtcctgccagcaaccagaaagtggtcccactttggctccttcagactctgcagtgggtggtgggggcggttctcagagcccccctccttcttaggcagctacacagcccagtggacttgggaaattcagttgacttccaggcccgctacatgttcaggtcaggagggaagcaggcttccgagttcccttctggagcgagggctgcggggtggagagaagtcaccctgcccccctcccagctagacccctaactccccgacccccacccgtgaaaactattgtcattaccattgacctgctgcaaagccataaatttccacccgcctcccctcccgcagtcatcaatctgccctccggtttttacttggtagggggcacaaaagctggggagggggagtcaggcgtgggcagctgaccagatgtctcctgggatccctaaactgcgtctcatttctgccagatgaagcgagtctaacctatcagcctacttgactgcggtgttgcggagccgggggtggggcgtggtgggacatttcgtctgcaggagatagagaaggacatcccataacactccaggtttcttggccagatctttttatttctacccccaaaacagacagcccacaggcaggagtggtctgttgagcagctactcccattgtgccccgcatgggtttatgatggactttgtgcaggtggctggacagtgtgcttcggaggccgagaactccaagaactctgagagctgctgggctctagtccttccctcttggtggcagcctggaagcctgtaaatttccccgcggagtggggaagtggggtgactgtgcttgtaatatttcaagttatacagtcattcgggggttctttctgctctctcataattacagcatctttaagaagaaatatcaacatgaagtattttcaggggaagagacttttaaaagaaacacacacacacacacacacacacacacacgcacacaggccagaacaccaccaccgagttagtatagtaatgcaagttcgtaatgcatgcagggctgctcgctccaggaagctcccaagcaggaatgttcctgaaggatgggctattaaatattggatcctcaggctggcagatgcgtctgcgctgtaattgggtctttcctggagtaattaaaggaaaatgattatattaacccaagtcaccaggccagcatggcatagagaactgaatggcaacagtattgatgtttccctccaaaaactggcctctctcagcacatcaaaaacgcacccttggcttgagtttagggagctttcctttctttgcactttttataattgatcgcgtgtctcctggccttctttttctttttaaaaagcagtgggggatatccgtgccctctaacgtgagcagcctctacctgctcagggagatctgagcttaaggacaagtgtggcgtaaatgcccccggagactgcggcgtgagagatgacattgaaaaaggtctggcttttagagctcaaacctgggaggcttggactcttttttcttcttcttctccttttctgaagagttggagaagccggagtttcaagaccgtcttggtgtgctgccttatttaggaggcgagctgctgctcatttgtcaggcaaaacagatgtggtggggagacaacatctattttcataattcgaaacaaatctggcgagccgccttccttttcagcggggcctgctcatgcagaaagcccagctcccaggcagcatctagcagaaatatttatagctcatccattgaactttccttcctccaggaggagttggtttctgctggcgatggggacacagacttgacagggagtgggtgctgtttcagggattttttttaaatcaaaaactggaggagtgtgggtcacagccagcgacgcagctgtgcctctccttctcgtgtcctttcgtcttccaggtgtggggcggtgggcacgggagcctgctctgtagcattcagcagcctctttactgggagggcagttaaaggctgactttgaaactcctctgggccggcgcctaggaccccgacactccagggagacccagaacctgggcccctagttaccagtgactttgtgcttaggtatgcaagggcagcgggctgtcatttccccattttatggatgaaaccaccgaggctcagagaacagcttgcccaaggtcacacagggaaccgctggtggagctggtcccccgctctgagcaccattcacactcagctcaagccttcattcccactgggagcctttgctacgccgtcacctcccatcgaaggtagctgtgtctgtctgtgtgtaatagtgacctaaggaaggaggacagacccggtatttgggcgaatcacccatcttctgttcatttatccagtaggtgagctccttccctgtgccactggagatgggaggacctggtgaatggaacaggcctgagcctgccctcagggagctactagtctggtgcagatgggaaacagagtcagatactgaacggaggaggagattcgacagtgtcacatgactgtgcctgggggctgctttattggtctgagagggtctctcagcagggctgaccttgtgctgagaatgagggatgagaaggagtcagcggtgggaagaccttggggggagtacctcaggcagagaggagaagccgagagggtgaggtctgctaagctaggtgtggtggccatgtccagttcccagctggccgtgtcaccttgaggggggactgaccaggttgcagttccttcttctgtaaaatgagggggtgactaaagcgtacacaagttctgattctgggaaaaccacagagaatcgagttttgtaaggtgctgccagcaggggaggaggtggagggtacgtggagagctctattattgcttacagaattgaacgtgaaacgacaatggttgctaaattaaaaagttggttattttaagcagtgaaaggtctgggagggccgttcccttcttgatgctgggaccacccttgtaagaggcagcgccacaccatcctcacggtcgtctcaggcaggggacaccctagagaggtctctcgctgtcacccgcagatggcagaagtgggactggctccggggcaacccctggttgcctcgcacagggctccctccctggcaggaaggaggcccatgcagggtgagggtgccctcaggagctcaggcaggcggcaggtttggagggacgggggttcccagtggcagtgatggaggggtgtttctcattccccactgccgtgattccatgcaagtggatggagcgtgctggagaggtcaggaaggagcatgggcgcctgcctcacccctgccccaccagcactcaggcaggcctcacaaatcacaatgggccctgtccctggtagcacccagggttgatgaatggggactcccaggccctggggcacttggaaatccctcatgcaaaaggtggaaactagaagttgtcctgcagattgacattctcagaactccttccctcccttcctcactgacccggccccgacccgtgggatgattttcattctcctgcctccagagaaggacctgtgcttacgtcctcacgcagactgctctccgccactttccctcacccatgtattcatttcacaagcatttacgaagtgcctcctgtgtgtctggcatggtggttggtgccagtgtgcgttgatcggtgatcaaggtggttgcgactccagcctacagaaatgtacaatccaagtgtgaaatgaacaactgccctttcctaagcgtttgctttcaaagcagatgtttttagactaagttgttgttattcttcaaaccggttgtgtgtggtttcagtccctgcttctgtcttcacattgaggcctaattaggaatcagctgttgcctagctaatgtttattgagcaagcactatgcacccggcactgtgcctgagatattcactatcatctgatttaatccagagtttctcgaccttggtgctgacgtttgggctcaataattcttttctgtgggggacttccctgtgcgtggcagggtggatgtttagctacttcccctcgcccactggatgctagtaacaccccctcccagttgtggcaaccacaagtgtttccagatatggccagatgtcccctggggcaaaatcatctccggtagaagaaccacaccttagccctagcagctgcccttgaggtcccagtcccttcatctgcagaatgcgggtgttgacgggactccccaaagcggctccttgggagctttgaatgatataatgcacttaaagctcttagcacaacccagctaaagctggagtggctgcagctctccccgctggtgtgtctgagtgtctgacgggcagaagtcgtttttaccatccactcatcccccgacggttccctggggcttgcagtgcaagccagactccatgccacaagctaggctcaccttgcaaagatggtcaaggtcacagccattgtgaccctcactcccaccagggatgcctgcgtggacagcctgtacccaaggaactggaaggcgcaggctctggctctagccagctttgcacggttgctctgtgtctctgggcaactccctccccctctctggccctgtccttttctcatctgacccattttaggggcttctaagccactctcctcccctagaaactcagtatctaagagggtgagttttttcccaaggttttcccctgggtcgtttacaattctgatcacttagggatctctgagccactcacagtgccaggtgaccacccccttccagcataacaaattcacctatgtggctccagcagttgctttcacatcctgggcttcataattgaacaagtggttccttcactaaggaagcgagcgcctggttggaatctgttcatccatagcgggcgcttgtaagtccattccctgcaggtcccggaacccgccactgaacgatgtcaatttcagcctgttggacacggctcccgcattgtctgaaaggagcttccccagcaggtctgatgtgtgccgtgtttggagagtcacactggaaaatgatacctgaatcgtttcaagttcacgttgtctatgctgcctttgccccaatacacacccatggccacctgcaggaagtctcagtgcagctttgccaagccccaaagcagctagctcctcattgtatcttcatgctatgccccaggaggtagggtttcttgcccttgaatgagacaaaggtttcctacctcagggcatttgcacttgccattgtttggccaggagtgttttttccccaactctcctcatatttaaggtctctgctgaaaagccacctcctccgaaaggctgtccctaaccagatcatttaaggaggtccccgctcctaggtgctcattatcacaaacctgctctagttctgttccatgttctggagaagacagaggaggactcttcttcaaaaacactcgtgttgttcagagatccctgcagttcctggctcttctgtgcctgaagtgctcactggcagagacgtccgcagttcttcctgaacaatatgttgatactttacagtgatgctttctcttgggggtacagtggtagtttgggacatccttttgggagtatttgattgtattggggaggcagtgacactttacatcggggaatcccaagctgctctccctcccctggctcttgtcacctttaagacagaggttggaggttccatgcttattacttggggcagacaataggagccagtgcttccagattacttaaaatctcctttcctcgtttctaaattttaaatgacgtgtttagaatttaatcttcaaacctgggagccagacctgcaagtggagagatgacagccgagagatggtttcgtgtggctgcagcagccagatggcagatgctgtgagcgggaggcgagggaggctgcgagagagggaagcggcttctgtttcggctcttaccctccctttgcaggaaactaaccccctcccccagtgccaggcctgggccaggccctaaggaccgcttaaggctgctggcctcagcctctgccagggcgattctggtgatgccaagggacagggcactcccagaccgttcacttgttttcagaaaactttttattttgagacaattgtttgttagcatgcggttgtaaaaaataatacagagaggttctatgtagatatcctccagcttcccccaatggtaccgtcttacataactgtagtacagtgccaaagccagcagttgacatttgtcacaaaccatcaaccttacctttccccagttttacacacactcattcgagtgtgtgtgtctgtgtgtgtgtttcgttcaatgcagttttattgtatgcgtagatttgtgtaaccaccagtcaagacacaacagtcccatcacaagaacatctcattctacccttttctaactgtatccacccccttacccatgaaaccactaatctcttctccatttctataatattgttattttaagcatgttatagaaatggagtcatacactatctagccttttgaaattggcttttttcacttaacgtaattctctgaagatgtctccacgttgctgtaggtgtcagtagttcattccttcttgttgctgcgtagtgttccaaggtatgaatgcaccatggttagtttaaccattcacctgttgagggacatctggattgcttccagttttttttgtttgtttgtttgtttttgctatgaaaagtaaagctgccgtgaacactcatgcacaggtttttgtgtgaacattaagtcttcatttctctgggataaatgcccaggagtgcaattgctgggtcggatgggagttgcagatttagtttttgaaagacccttcagtttccattcacatccatgccctcctctggtctctggctttggtggaaagatgcgagtgctggggaatggacattttgcagagattccttcctctttcacatgttaatcgagggccacttcttgtgtcaggtgtggtgttagccctcacggatacagcgccagggtaaataagggtcatcgaggcgctttcttgctggtgaggtgcacttgacaatgaacaagcaagcacttagaaagaagatggtttctcatagcagccaacacgtactcagtgcttcctacacaccaggtgctttctgggttctttacgatcctcaaacaacccaatgagacggggccatagttcactccatggtacagacaaggaagtggagacacacagctgctcccacagccagaataatccatgctcctgaccatactctgcactgcccctcgtgaccaagacaggccaccaggcgatgcagagtaagagaagaggtgagagcacatgtgggatgacagacccagggcaagtcttcccacagacaaaactgcatgtgcaaaggccttggggtgggagcaggcgaaaggccaggctggctggcgcatggtgagcgaggaaggagatgggaagtgcagtggtgaggtggggtgggcctcgcagggttttaacctgagcatagtgtgggaagtcagagacttgattttttttaaagattgttccggctgcagggtggagaatagacggggggtgtgtttgcaagagaggaagtagggagacaaggaggccacgtggagaaaccttctgctcttgagggatgaacgccaaggttctctctcctcctcctttggccacagggtctctgtgtgggtgctcagcagtgcaaggaggcctctcgtcatggggggtccagctcccagtggctctcccacagctccgcccctcgagggcaggagagctgatccccagccagtcggccccttgagcctctgcagctggaccgtgagctcccatctaggtctgtcttctgatggatgtttctggtttcttgagttttctcaccatttctctttcttcctcttttcgtaccagttgtgattctataaattgaatttacctgctcagtatcagtcactccagatcgttaataaacgtgcgcctgacatccttgacgcattcaccatgcttgcccggtcagcatgcatgctttgccatgtcatgatgcctgctttgccatgtcatgatgatcaccatttattatgcacttgctgtgtaccagctagcgttccgagagctagtacctatgtccctgttgagttcacccttaagcagtcctgtgaggcaggtactgttgttgattcgtgccttactgtgaagaagctgaggcaaggggccaggtcaccacagacaccacacatacagcaggtggctgcatctggattcgaatccagagccaggctccctgccttccacagctttgctgtgtccccatctcgacgctcagagaaaagacacctccggaagcttcccctgctgccttcgcagaacagttggtcagaacctcgtcttcccagaatttgggattttctgcttctggaagatgctgcttcgaaaggaagtgatagcaagggctggaatagcctcgcctgtggggcggggacagggagaggcggctgatgtctgggaggcttagaacttccttcttggaatctgtttttcacgttgcctgaaaaagaaagaggaagagactcatacagatggagacacagggaaagactcaacggatttagaccccagacagtcacacaccggagacagacagacagacagatgccccagaggaaaggacacacccccaaacaatcaaaggtgggaggcagacacacagacacccttggacacgtttgctgccctggagccccctctctagcgaggtcgcccttcccatctgagctccttccctcctcaagctgccgctgggcccggcaatccattcaggggccgactgtcagtgtggccagcagcatttcctagaccctcctcccccaaaccggaaaacactcgtagcaaggaatgccccgcctgtgggccaggggtcttcctgggcctctgagccccacatgaaggtgatgagccaagcgccaggctagggtcagcaagttggcatggttggggggcacgtgggtcatgatggcagtgaccttccagctcagtcgggctcctgacggactcaggccttgccttttgctgcttccaagaggtcggaggaggtgaaggcatggctgccggtggaggggtcggggctgctggaggctgcttttcggggtgggtactttgttttgagtttgttgtccactcttgtgactagtgagaacagatatcacagcaccgggctctgtgtcccaggcacagggaaagtctggcccttgccacctgaacttctgtgacttttctgggcgggacgggtggagggtgggcggtgacattgttgcacctctccgagcctcagattccttatcccaaaaatgggatgataataagacaagcgtacttcctgggaagctgctgagaaaattaaatgagatgacagaaacccctccatatggggcatgaaacacagcaggagctcactgtacctactgcacgttcactgtggtcagaacggctttagaagattccaagctattcctcgtatgtccacattcatctgtccagatataagtccagcctgatttctggggtacaggatcaaattgctgtgctccagagaggacagatcacagtagaatttgcgtgccctcgctcctgaggcctggcctcaatcatcgtgaattctcagtgctcatgcagggcctggcatacagcaggggcacgataaatatatgcgctgccgcagtgagggaataggaagggaaagggcctgaggatagatttagatgacagaagaaaatgtctttcatggaaaataaaataagacatccccctgggcgtccctgcatggagacagagggcaggttgctaatattctgtcccaaaggggtgtagctgggattctgcaagtccatcatccagggcaggggtcctgcctcctcaccttgcagctcatttccctctgttcagccccctctgtctgtctaaacaaggtgtattattctgctcaggccgctgtaataaaataaccccggactgtgtggcttagacagtagacatttgttttcctgcagttctggaggttgggaagtccaagatcaaggggccagcaagtttgggttctggtgagaactgctttgtggcttgtagatggccacctcctggctgcgtcctcacatggccgttccttggtgccagcacatggaaggaggggggagagaatgagctctatgctgtctcttcttatcaggtcactaatcctgttggatcaggcccccacctttatgacctcttttaaccttaattacttccctagaggctccgtctttacatgcagccacaccaggggtcagggcttcaacatatgttggaggggcacagaggtctataacacgaggtcctttgctttctgctccaaacagagggtttgggaagggaggtgggaatggccacctctataatgttactattagcaacaacccaatagtggccaccacttgtcaggctttgggagaggcatttactatggaactcccatgttggttgcatgagtgaggccccatttgctcttggggtctgaaggtgggaaaacaagcccagagaggggagggtagcactcaggtggcaggtagcagggtccggactagggtgcaggtgtgtgccacatccaggttcacaccgtgagcctctgtactgctctggaggtagtagcttggctgatcatgtgttgactggctgtgggtctctttgctggctgtggaccaggtgccagggacactggtaaagggacactcatgatgggacactcttttccttgtagctgggagtcccacgtggtggtggcctgtgcttgacaccacagtagttactactactatgcaggatgtggcagttctcaggcgaccagccctgggctttgagggttaaagaggagtctaccagttagagactggactcctgcatgccgggctcatgccggctttgaggaggctgcaggacgaggcgattgcatctgacagagtggccacaccaacgatggcagcaagacatagaccgaggaaaggctaagtcatgacttagacattttcttagaagtcatagcagatgtcttgggtggtatttacaaaattaaccaccacatgggagagtttaaaactgccagagacagccagagaaggaagtggctgcaggggctgggccattggaaatggggtagacgcaggccaccgagaatgggcagcaggaggagggcaggcaccccaggcaggtgggccagcccgggcaaaggtgtggccccaagaaggcaggccttctgctcccagtgcggccagggtgctggcggccaagaggcttggaccacagtcaggggcaattggtgatgaagtcggggcgggggcccaggagaaccggcatgttgggcccagggagcagccctcttactggcggctgatacttactgcgcacctaagtatgcaccaggtgccgttcattgtactttatggctcttcactccactgcatccacacagcaacccgtgcgtgggtgctagtggtattccgcttttccagatgtggaaaccgaggcacagagagtgaacgaatcacttcctgatgccctgtgtttggccatggggagagctgggggttggatccaggcaggacagcgccaggattccttttaaccgctaagctactccgctgagtgtttactgaattggattcgactcctgggagcccgatggtgcaaggggcctgcccagaccctcactgcttcctccagcctctctgacgcctgaccttgcccatctgcccacctccctgcctctgccccaggggagaccgagaatagctgggcccctcttgctcccgaaagacagagccaccccgggttagcggcgagacccctccagacggtgcccgtcgccgactgaccctcagaggctctccagcacgcggcgggcatcaatgaggccccggggattgaatgaggcactattgagaagcggctaaataccagccgcattgtgcttcctgatccagggcttcgctttttgtccaagagccttggaaacggagccccggttcacttcccctcccctgggcgccgcccgccatcctggctcatgtcaggaaacaccaggctcttgaaaatcagtaattgagagaaacatctgctggttaccaaggagcacgaggtgcttgccgagtggcgagggcatacgtgcgtcactgtcggccggttggaaacacacatgtgagtgcatgcaggcacacacgtgcgcgtgcgagagtctttctggtatgttattaagatttaaaaaattagaagtgttatgcctgttataaaaatgcaaacaatttacgaatacaaaaaagtaaaagggatagccccttcatctagaagaagtcatcatgaacaatttaattttttatcctcatttttgctataaaaatggatccatattttatttaccattccagtttcattatttctgccccacaataattgccagcatccatccattatcagactgaattggattcaattcctgggagccagacagtggaccagcagttcttagccaggggtgacttgccccacagggggcgtttggcaatccctggagacatttttgagtgtcgcaatggggattgatggtgcttctagcctctagtgggtagagcccaggttgctgctgaacaccctgctgcttaggacggccccacaatagagatgatccagctccaagctcagtttcccctgctcagagctcagcgtagatttatgtcatcagttttaatggcctcatcccataatgtgatgtaccaaggtgtgtttggtggcatttagatggtctctggttgatcatttgaaaaacaccccatgcaatatatatatatgaacagggatatatatgtgtgtgtatatacatatttgttttgtgtatatctatatatacgttttgggcccttctgtgaatttttccactggatatgattctggaagttgaacttgcagggttgaaaggtgaagtgcttgtgtaatgttgacaggcactgctcaatatcctccaagaagactgtggccgtcaacaccaccacggactcactcacccacgcccacccgttccccatttgtcgtccactctcctcaattaacaaacacatttggtttattttaaataactttcggatgttatgcacctccgacatgtccactgactgctcgctcactgtgagttcactccgttctgccaataattcaaacggtgactgatattttgctgacagtggatgtttaaaggtgttcgatgtcagtgacaatagaaacaaaaatcccattagttctttccatttggataatagcaagaaggataaaaggcacagctttgtcttttctcattggaggagtattctaaaatcatcaggttctaaaatgattctagagaccgtttactttcctgttccctgaatgcactttcagacgcagggctcacccacggccgcgctgcatcctcctccaggtccacctcctgtgtgatgactcgggacactggttgggggttgggggggcggtggggaagaacgtgtttctctgtgttgctcaggaactcccaaagcttcggaaatgaatggggttctgcacagttctctctgggtggtataaaaaggcagcccgcccctaacctgagtgggcctttgcaaactagaacagggtaccagtgaaaagagaagcacacagaggccaggtatgtgccgttcattgatctctgaaatcccttgggtctgtgctggctggggacggaatacaacgcggagtcaggcacacccagcctgacaggctcagaccatagggcagggggccaagtgggagttagtgtgggagcctggaaggggaagaccaaggccgacggggcattgcaggtgtgcatgcgacctgagggtggaggcttgtcaggcgtgtcagccttgatcctggcacctaggagggagggaggttggaaggagggaggaaagattgtggtgagtcagccaggtgaagaaaaggtggaagtggtctctagacagcgggcatgagtgtggatcctggggcttgaggccgggtggtgagacagcacactcagaaccatcatctgccagcccattagctgtgctgcaccacggaggcctagagaagacaccttcctccctggagtggcccagtgaaggagagacagtggaccggtgggtgccacagggcagcctgcatgcctggctccatgtactaccccccccaccccacccctacctccaggccaggagagggaaggcccaggaagcgagatgtctggtgcctggatgccaccttggggccctcagccagggcacgtggaggggtggtcaggtgcccctccctgccccacccattcccagtgcagtatctgtgctcctagggtcaggcagagactgtccggccttcccaccctaattccgagcccctcccgcagcagcccttgtcagcccagggtgacagcacctccgcagagaccacctgggaagcctcgttatgggagcagctgtctgttttggatactgacagatgcttctcaaatcttttttttttccctcttttactataaatataattatatgtgctccaaaatgctgagattgcagaaatgtattacacggaagggatgtcccctggtgtctgtggtccctcctcgagggacccacagctggcagtttcatgcatgccctgctggtccctggtctgtgcagacgtggacagtcactcataaatataggtgtgtatcagaaggtttcacctgtatttttaaaaacatatttgttgttcttttctaacccagtttgggctcatcccgtgaggatacagactgaccggtggctgtgcttcccagggtggtgtcatccctgccagggacatttcagtggttcccagttgattgtgaccttttgtgcaaacctgcagggggccttcttgcacactcatctgtgtacaccagaataaatgagcttcagttgggtgcggtggctcacgcctgtaatcccagcacttttggaggccgaggtgggtggatcccttgaggtcaggagttcgagaccagcctgtccaacatggtgaaaccccgtctgtactcaaaatacaaaaattagctgggcgtgctggcgggtgcctgtagtcccagctacttgggaggctgaggcacaagaattgcctgaccaggaggtggaggttgcagtgagtcaagattgcaccactgcactccagcctgggcgacagagtgagactctgtctcaaaaataaataaataaataaataaataaataaataaatgtgcttttttattcagtgtagtcattacgtgcctgccttggggaaggcaccattctaggtgctgaggacaccatggagaatgagttcgctctgagccactgatattccagaggggagaggcagagagtgcagtgttgggtgggtcatatacagcttccagatcagggctgcagagatcagtaaagcaggcacagggatgggggtcctggaggctggagggcagagggctgttttagtctgaggcagggacctgggggccgggatcaaggcaatgaagggagcaagccatgaagatattgaggaaaaatcattccaggcaggaagaatggcacgtgccagggtcctgaggtgggtcatgcatggtgcttttatagaacagaaaacaagtggctggaacagagcacatgggggaggagcccaggggaactggaaatgggtgatcagcacccagctgtctatatgctggagcaaaggttcacacctgaaaatatccagagtttgctgtttcactctgcagaggtgctccagcctacactgcacataagtgatggcgctggaccggggcctgcttaagggaaccttctccacccactgtgagtttggatgcctgcagctcatgtcttgtggggacaggggacaggcgtaggaggagcctagcccagagcttggagttcttgactcaagaggttccatccgggaagttaactttcgtagttcttgctacaaccttgtgtacaggggacttagttatctctccgttttcttctcagatgagggtaccaggagatttactgaaggtcacagcaaatggcaatgcgaggacttgagcccaggaccactgggtgctagctgcatgctgttaacctctatcccaagattctaccaagaacagcagggcagggagccagcgcaggccctgatgtgggccccagtccccaccctggctgaccacgtgacttgtcccctctcagcgtccctccccaacatgggacagtgtcccaggttcacctgtccgggtgccaggtgctcagccgtgtgcttgccacaaagcaagcactctgaaagcagtacagtctggttttaaaaacgagaaaaccggcctagatttgccgcccgccccccaaacctcaagaggaagacagagcaaatttttttacccataaaaggtcttaccctaagaaatagacatgccgtcgggggtgtttgaaatggcaccaggagtgatcagaaagttattcctttgacggctggtttgattgtacttaaaattcggggggctggggtggggtggcagggagctgggttcctattcaaatgtagtgggggtaggtaggggagagggcagtaaatgaagtggctggaaccccagggccgctggggctctgcagaatgacaatgaggccccgccaggcgggtctcatccaggcaggcctaacaagattagattttcataaatttcagacagcgccaattcctaattcctcggtgtgcggccaggaggccagacagggccccatgcactggctgcttgttaaccaggaaggacgccagctgcccctcccctgggacagactgttggggtggcggtggaggggggtcgtctggtctggaaacctccatggggccggcaggagccgggtggactctgctcccagctccccagctgaagagagagaaatgagccccagcaccccattgttgcccccgttatttctgagaaactcagtcgccgccgcacctccccgcctagtgcccccgtgggctgggtgggttcttcttgcacattaacaaattttccagcgaccctctccccgtttacagccatgaaacgtcccaacagggatctgaaccctgaggcccctgctctgccctcagttcaggtccaggctctgcccccaagaacagaggtccagaaacttggatgggaaagaatagtgtctttgccttacctgagctctaactgaaaggtggggtccccttggatcccaaatgcaggcacctgaccatcgtctccttgactgcaccaaagacacagctggaggtgggagccaccatcttcactccacaggcccatgtcccgtacaggccttccagctctggacgctgtgggtgtccactgcgaggtcatttaatgcaattatatttctgtatcgcacacgtgccatcgtgtgtatcattcccgtgtcacaaatctgcttcggagtttggaaactatttccaggcccgtcccctcgcctgtgattggggcaatgctgcccctcggggcttgtcatgaaaaactcagagacagggtgaagtctttcgtggtgaggggcttggcacacaggaagaggcagaggagagggcagctgtcagcgtctgtgttatgccatggcaggtgcccataactcctggcacccgcttccttcctcaccgtccggattttgctctgcgctggctcagaggtgggtaccacaggccatgaataccagcttcatggactgcgttgggggcgacacgccaggcacttgttactgaccccaagatcagtcacattcaacacaagcccttggctcaatctcccgctgtttctggcattttgggataatcacactcaggactgctgggggtcgggcaaacggtcaggctttggggtcagaggaactcatttctgagccttggactgtgcggtctttggcggtcgcctcacctctcccagcctcagtctcctcatctgcaaagtgggggtcccataagtacggacctcacagaatgacggtgagaattcaatcagatgatgtgcataaagggttcggcccccctgcatggcatctagggagtggcctgctcacggttcctctcctgccagtgtaggacaaacaggacagggcagagctgtgcccgcacctcccagagggactgtgcctgtctctggaggagaccatgaaaaggaggatggggcctctccaacgaggcacacgaacctgttaatgtgaaattattcacaaggaaagaggacactaaattaaattagagtgaccttattttgtgtttggaagatgggcttggtcacccccgagagcctgctgcattcatcaccctccccaagggaaaaattacgaagaaaaatggcaggagcccccgggccctccaagtgatgagcacagccttgatgcccagaatgaaatgagagcgagatgtttctccttcccagcggcttgtgttgccacggcgggcccttgggggagagaaaggtgcctccccgcaagggcctcagagtcaagttcaaaacatgatgtgtgtatgaagcggcaccaatataaacatgggatccagcgcatgttagcccctgaggggccttgggtccagccaccatcctgggtgacctttgggactgacttgagctcaaatctcccaccttggggacagaagccagtcagggaacacctggctaagcaggcttgtactctgcagcccagcaaacctcagcatttccagggaccatcaggggaacgagggatgctttttgtccccagaggagtgtcagtaattgtgacaatggtgacagttgagtgtgctacgttctgtcccgttctgagctctcgcatccattatttcacccctgccccggttggttcttttttttttttttttttgacagatgaggtaacttcctctcaaggaggtagatgcgcacagcatcacacagacaatggatgcacgaggactggaccagaacatcagaaccacatcctcagattcccggggcagggggcgggcggactaacgccgtgggcgagctaggaaaatttagcaggagaatgaaacccttcccccttttgagttcctatatggcggctctgggctcaagtctcaaccttgctcctagttgcatcttctagggctacttctccctaagcctcagtttcttcatctgcaaaatgggcatggtgatgttacctaaattggggaggctcagctcagtggccccgggtcatgtgttagaatcatgacaatacttacagtgactacagtgagtttgggtgtgccctctcctgctctgtcccctgtggcctatgactgcttggcaatgtgtcctgtggtcacagcagagttgagcctaggtcagggacagtggtaggacccacccctgcaggtgtcatactgggcatttgatctgggatgtctttgtccatgccttggtaaaggggcagtctgtcagattagggaaactgaggcaggattggtgtggctccatatctgccagtagtcactaagtgacctggggcccaactcttggccagaagtcctgaagccgcctgccctgcagatgccttgggtgtggcctgcttggcccttttaaaactcttaaatgaggttccagccttaaaggaccacagcttcacagccggctccagggtcctctggagagagggagggatgcggccgcgctgggccttctctccttccgcctcgcgttggcagtcctgctggggttccttcccttgcccgcgaggcatctgatcctgagagtccggctctcaagctgcgactgggaatgggccccagcagcctccctgcgctcctcggaacaaatgcaggcacgaagaggattctgcgagctgccgcgggtggagagccgtgtttatattggtgccgcttcatacacacatcatgttttgaacttgactccaaggcctttgcggggaggcacctttctctcccccaaggggtctttgctggtggattcacggtgcctgcccagagggatgtgtgggacttagtgtggggagggagcccatgcttgatgaactcggcctgagtgggccctgatcagtgcgtcgtagaggcccgcatgctgagtctcaggcatccctggggtggtgtggggtggggaccgacagtgtcagggcgtggctgtcccaggccaggtgagtcccgggaccaggcctgtggagagggtggctgcccacagccctgctcccgtgatgccaggtgggaacacggctggggccagggacggtcggtgcgcgtgcccttgggtctctggtttgcgaccgacctcgccagcaggcactgcatggtccactccccagagaatgcattcctgtcccctaaagctgagcgtctcctggaagcagcaccatgggtgtgaaagtgcgtggaaggtgcctcctcaccccatgcccaagggtggtcttcgttggacctgtttgtgggccccaatgctgctgtgcctgaccagccttcctcccgcacagcatccgcgccggtggggcttgactggagctggatggagatttcggggcctccttggcccagggtgttgccttcctgatgggtgggggtgacccggctgctggctggagcacctctcttgcccccctcaacacctccaggtctgggcatgtccaggggcatccaggagggtctgggttccggcctctgctcacctataccctctgcctgtgctccactctgccccgcactccgtgccctgcaccaaaagcctcagtgcccaccttacagggagccctccagggtcttccattagatgctccctctgcgattccagagcaggtcatgtctctttgagggtggatgggtttgggccacccttgttctggtggagccaggatggaattgagcatcccgtgtctgggtccacctccagggagcactacatgctgagcacatgtcccccgcacatcctgctgcccactgtccccctgctgcccaccgtccccccgctgacacagggagactgcgatggactcagagagggcccccaagagccaggctgggacccgggccctctgagagagccactgtgcttccctgccaccaccctgctcctctccagggtgctcctgagccgtagtctcggcaacccttgcaaatctccatctccctaagcctggacccaggcccttggctcaccaagtctagccagcagtcagttgtagtttctcttttctagagagtttttctctctcctctcccatgtgaattttcctgggccagtgacccaatgggagttggtggcccagggaccagggtgacgctcttatgcgctactgagcccggtgctcatttctgggagcgtttttctcactctgtggatacagacgtccaaaagtcagatccccctgcccctggggccgagcctggcggggccaggagagccgtgagggtttgtccacacccattcagtctgcaggggcctcctccattgcccctgcatcccaccggccctgcagccccagctaccgtctcactgctgtctgggtcctgcgggctgccagggcccgggacagggacaaaaacagccacacacctccctccctccagggctgatgtgggctgggcccctggagacagctggggaagggggaactggggtgaagagtgcacagggttggggggcagggaattgcaggccccgggggtgggggggcgtgggtgttacacaaagccagccctgtgtgtaccctgaatgcggctttatcctgagtgctaacagacggacctgggccctacagaatcaggccaggctgccccggccctggacctgcctgtctggggagacaggaggtgtggccacagcgacctgggtctgaagcctgatctctcctggccaggaacatgcgggtgtcccacaggcggcccagggcttggggcctgagttcccagcaggcagggccgaagccttctcggggcttgggaaagccccaccaagcctagtgggaggacgcgccagctctagggtcttggacttctcgaggcaatcacttttccctctgagcccgtgtctcctcacccgtgaaatggggatgataataaaaacgcccgttcttaggtgtgctcagcccacagcatgaccgactggattggatcattctttgtcatgggggacagtcctgtcggtgcaggacggttaccacagcccctggcctccacccactccatgccaggagtaccccccagttgtgacaaccaaaaatggctccagacatcgccacatgttccctgggtgcagacgtggccccagctgagaaacactggctcattagcagtgtagacaatggcgcgctgagccctgggtgcagatgcggccccagctgagaaacacgggctcagtagcagtgtagacagtggcacgctgagccctgggtgcagacgcggccccagctgagaaacactggctcagtagcagtgtagacaatggcgcgctgagggtggcacagatgcataaagtgcccgagacggggaagttctggaaaacctgttggggaagaaggagtggcagtggacacaggtgtgggagtgcttctgtgtggagaggcgtctgccacttcacagacagtgacattcccacctaggatgggctgctttcctgccttggggagagcgaggctggtggcaggagatggctgggccccccgggtttggagtgtgcttgcctgggctgtctgatggcccgagcgcctggcatcggctctgcacggcctgttttttctccagttgccacctgacacctgcccaccccgatccccctcccccggctttggttcctcggtcctgggaggaggaggaactgagtcagtggcactgggcttgaactggggcccccagggagcctggctaattgcttgttagtgccagggagccctggggagtcctccttgcccccatgccagccggggtctggggagtcacattcctgcacaccttgggcagggtgtcctgggcagggcgaagctggaggagctttggccccggacgctgccggctggtgcccactctgccgtgtcaactccaagggacccggcgtcttgcccattgctgggggctctgctggcaccgtgctcggccagctgccgaggccgcttcggcacagacccgcttgagtcagcagaaactgcccggctcaggcaggatcaaaataaccttcttcctattccagcacttgagggtttttccgccttctaggggaaaaacaaatcaaaaaccaaaaaagaaaaaacaaaaaaacccaaccttagaaaatgcgaatggcaacatccgcagccatctggaatgtgggttttctgaggccttttcaccaagaggagggtcctgacacccccgtcctgttgagcgtggcgtgtgtttgtgagtcctgggatggatgtgtgtgtgtgggcacgtgtggtgcgctgtgtctgtgtgtgtttgtgtctgttgggaagtgtgtgttgggatgttgacttgggtgtgggactgttgaggggtgtgtgttggggtgttgatatgtgtgtaggagtgttgggtcgtgtgttggtgttgacgtgtgtgtaggagtgttggagtatgtagtgttgttgacgtgtgtgtaggagtgttggggtgttgtgtgtggaggagtgttggggtgttgtgtgtgtaggagtgttaggggtacgtgttggggtgttatttgtgtaggagtgttgggtcatgtgttggtgttgatgtgtgtgtaggagtgttggagtatgtagtgttggggtgttgtgtgtgtaggagtgttaggggtacgtgttggggtgttatttgtgtaggagtgttgggtcatgtgttggtgttgacgtgtgtgtaggagtgttggagtatgtagcgttgttgacgtgtgtgtaggagtgttggggtgttgtgtgtgtaggagtgttggggtgttttgtgtgtaggagtgttaggggtacgtgttggggtgttatttgtgtaggagtgttgggtgtgtgttggtgttgacgtgtacttaggagcgttgtgtgtgtaggagtgttggggcatttgtgttggtgttgtgtgtgtaggagtgttggtgtgttgacatatgtgtaggagtgtcaggtgtgcataggtttgtgtacacacgttcacatgtagctcctctttgtttaattccacaaagcttcactcccaaactcagtgccaacttcctctctccgcactcaggggtccccttctcctcccaactgctccctccctgggcccctaagaagggtctgtgaccgtctgcccgagcctttgcccagcgacaggagccagtgcgcagggctccctttctgccagtcagctcacgctgtgcatctgcagaacggctccaggaggctctgagagcagagagcagggccttcctcctgcctgtcccgttacctccttccggtcagtccctacagagggggtgtctgggtcccaggacacctttgaggtgctctcccagccagcagtaccccctcctccgccgtgagagcagcttccctgcacgtaccccagccccaggcatcgcctgtgaccttgccgggagagtggcgggggctttcctgagtctgggttgcactctcgtccccctaggtgggtgaaaaagctcaaaagggctgagccctgagcacagcgacctgcaggtgtccagggtctcacgtgtccctctttgtctccacagcggagctggagtttgttcagatcatcatcatcgtggtggtgatgatggtgatggtggtggtgatcacgtgcctgctgagccactacaagctgtctgcacggtccttcatcagccggcacagccaggggcggaggagagaagatgccctgtcctcagtaagtgccccgccatcccatctgtggcctgagggtgcggcagtgggacgccccttgtaaaaactcagacgggatccaatggcagcgtttgcaggaaacagattcagggcaggaagacaggggctggggagcccacctgacagcagcttcctcccctgaaatgggaggaaagcacccgccaggcgggcctcagagatgctggaggaacgtggggaatgaagagctgggctgggaagaggcttcgtgatccactcacgcactcagctgactctcgagcagcctcgggtcgcaggctctgtgcagggcctggggagagggcagcacacaggtccttgctgtcatggagctgacgttccaggagggagatgagacgcccagtggtgatagcgccatgcaggagatgcgaccactgggacctgggggagcctctgcgaggaaccctcggctagggaggcagggctgggctcacaagcagcgcaagctgacccccgtcttgacccacatctctcgaggctgagtggagacagacctagagagatgaggctgaaagcagggaggcacctggggcaggcagcacaggaaggcattctgggtccacacagaggcctgacacaacaggatggtggagacgaggggccggcatttggctcttacccaccggggtagtggtgggaaaggtgcctgcagtcctgcagccctgacccagacggaagggaggtggcggccctgccctcgtgcccgtgctatgctgacatctggtcatgtggtcacaatgccttggagagccatagaggcaacaggacaccaggtcccggggcctaagtttaatcccatctccaccagtactggccacgtgccctcagacctgtccctgatctacaaaatggggcttcagatcccccatttgtaaaatgggctgacagtcacatccacctccccagagattcagggctttagcacagagcacgggtctggtcattactggctataaaagcacttccatccatccatccatccacctgacagatctctacccagcacacacacggggtatgcaaaattccccctgcgtttgggaagtggctgtgagccagtcccagggggtgctgctggtgagttggatgggcgcagacaggagcaggtgcacggatgaaggaagccgagggccgtggccaggaagttggggcgagctgctcttgaggccgtgctgtgcaggaccaggtgaagtgggcgcgggagtgtgaggaggacagagccctgcaggagggaccccgctctccattacagtcctgggtgttgatctctcagagttgtgagcattggtgggtgttctggaaaccccaagaatttccctttcgaatctccacaaagtcaggggcaaacagggcagatctgggtcggtgggaacttgcccgcctctgacggtgaactcccggctccatgtcggccgcctgaagcccggctgttcggtatccttcagcaggtggaccaaagggcggcacagagttaatctcttaatggcttccatctctgcacccaggatgtgtaactcaaccacgtggggcaggaagcggctgtttaaagagcaggctgggaactgtggggaggaggtggcacgtggccagccctggggctgcggcacgtctctgagccggggctcaccaggtgtggggaggactcacagaacaggcagcactgagtgtggcctccccacttctggggacgcctggggttggtggtggcgcccagagtccctgggctgagccaagtcagctgagaagcctgttggccacagtccctagccggaaggcctgtccctggcaggtctggacacctctgcttgcatcaggccccagcctcagtgcgtcaccaggttgccagggcaaggagcatcagccctgggacctctgatgggaatgcctggcccacagacccggggcccactgtgcgtcccagcacgctgtccggagggcgtgctgcagacctgctgctctcaagccccgacgtgtttatttgctgttgctaccactccagcaacaagcactggttacgtctgcccagggatgccatcagggacttcaggggttcaccccactttccagaggagaaactggggatgagagaggtggaacatttgccggaggccacactgcttgtcactgccggtgtgaagagcccacagcctattccgtcctccctcaagtgctggggagagtgacggtgcctggacattccagaaggcaccagccctggaggggcactaactccaggctggactcaccttgcccctcggagcctcagtgtgtgcatctccacagtgggttgaagctaggcctgtgcggcccgtggtcatggggaggatgcagttagtggagagtgtaccgtacccagaggccgactgcaggggcttcactgttgtggagcaggagacggcacctgggatcctgctgccaggaaggggtaggattccgtcacaccttcggccaatagaaagtctcctcccactgtctacccagccgcctgcacagccgcccgggatgcctggctgggtaaacgtggagcctcactaggcctaaagcagaatgtggcagctcccctggggaccccctgccagacaggagtccctgggccccgcggccttccatagagatccacatacagctcttatctgtcccgggcccagtctacatccccccagcccatccatgctctgcccctggcatggctatccgaccatggccccttttcagggtgaccctgggggtcccctcttgcctgtatggagacaagagctcgtgcctcacccacctgcctcaccatctcaggtaagaccctgagctctgaggtcttttctcggccttgtcacctccttgttgtgtgacactgggcaaggatctgccctctgagggtgaggctccagtgcaggcaagcccctcgaccagggatggcacttccaccctggcgctgctccgagggtattcgggacatgatgcagaacgtcactgcagtgaccgcccagccacggagtggcgcagacttcaggtttacccagaaaggcaatcccagtctttgtgcccaaggcctgctcagactaggaactcaggccttggatggggtgaccctttgtcctctttatcccccaatcagtcctcagtgtgggtctcctgctcccgagagaacccagcccaccaagggcccatttcccaggggcagggacaagactgtggccaggccaatgtgcgacaatctgccagcagcgggagccaaagacctagcgtccactcccatggcctcaggagataccgaattcccccaggccccttgtgctgggctgtgggggaattcagtatctcctgaggacatgggaggtaccgaattttttaggaacatctctttattctttagaaacatctctgagtcctcgaagtttgatagaaggccatcccgtccccttggatgttcctggggactccaggggaagaatgggcagctacgttctggcctcgtggtgttaagactctggaggggtctgggaggagctgcctgagcgtcagctcactgcggctgcctggttttgtcaatgaggtcttttctgagtgtgaatgaagtgttttcgagtgcgttttgcccatagctgcgcttggctgtagcagcagggttcagtggtatgacagagacccgccggcccacaaaccagaaaatattttactctctggctctttatggaaacagttttcagacccttggtctagaagcatctaaatggggaaggcgcaggtggactgggtgcgcccacttcaaagaagaggagtccaccccgagccctgggagtctgggagtggttggaggctgctgggagcagggggctcgtcagcagtggctgtaggattggaacctgtccttgtcctccacctggggtgactggcagacatagccagaggctggggaaggttccagacaattctgaagctgggcccacctcccccgacttctcaagccactttggaacctaattccacaaagatgacttgcacgggtcacccagcaacttccgcacttaagtagcaacctgagcactccctgactgcatagcacgccggcgcctggcactggggaaacggtagcagctcctgcagggcgagtgagacccctgaataggccaccgggggcagagggacaaaggctgtggtgcaggaggggactggaggagatgggaggaggtgcctgacccgcctggggggctaacggagagctctggggttagcacacctgggcagaggcttgaggggccagtcaaagttcttcaggaaagggaggaaagaggggccattggtccagacccaggatgggctcagatccaaaggcaagacgtgagagtctgtgttcactgggcaccttgcagaacacactgtatggtgcattgcaggcgctgtcatcagcccgctatacagataggaaaacccgttaaaggaaacagctatactacggccgtggacatctagggggtatgggcctcggtaaggggttggaactttctctcctggaggcagcggggggcccagacggtttaagcagaggagtggcagggtgtggggtggggggcatgagggagatgttcccacttctgtgaggaggaagggccctggggaagggcaagagtggaggagaccctgggagacccctcaaggacctcaaagaccagcggcactcgcagcctctgggagatggtgagacacgcaggctcgccagccctcctgctacagaatctgcatttttgcaggctgcagatggactgtctgcacatggaggccctggttccataggactttgctgtccactaggcacagatgctggggagagaggtggatagaactgtctaatagaaggagaagtgagaggggatcaagggtgggtggaacaagggtggtggggagaggagctgtcaggaatgatcctgtggatctggctttgcaacttgaagaatatcagagccattcgctaaatcaggagacgaggcagttaagacctccttaaggggtaggagcggtcctgacgggacagttttgaggggccacagagcctcctagtggccatatgggaaattaccaccctctggccgttcctacccaggctgcaggtgagcggtatcctacctgggaaccctcaaaaaacctgccccaagggaacgtttgaggtgatggacatactcattatcttgattgtggtgagaggttcttggtataaatatatgcccgaaccaaattgtatgctttgaatatgtccatttatttgcatatcagttatatttcaatgaagctataaaagtaacagacatccctttccccgggcccagggctcaccgtcatggcatttggggaaactcagaggaactggtcctggcatggggtctcattttcctcagagcagatggcataagcttcatgaagtggcagctgtgcccctgcacccagaccagagcttggcgccacagtggaaccacacacctcctttgccagaggctgaatcactgttttatggcagagcagccgccttgggcactttcctcaactctcctgtttttcacctgtgaactgggacatcagtaatgatgggctcactagatcaagggagagaaagactgtaaagaaataaatgcatagaagcaatgattaagttaggacaggtgctggaaagggaatcaacagatgacaaggttcacgggagaggcccttcagatgctggtctccaagggtctgcaggggacgctggaactgaaagtggacagcagcgggccgtgcagcctggcctgccgtgtaaaggacctggggctcgggctgagcttgttgaggccccagggggctggtcagcatggctggtgggagtgtggaggtgacacccagcacattcacatgctacctgagtgccacgtgggctccgggtggtttttacattcaaattcagcaagtgcttgagcaactatgaggcaagtactgtaatctcaagaactgtaattcaggtacagaaactgcagcgttgaaattaagtaacttgacgcaggtcacacagccagcagggggcccaggcccaggggagtggggccaggggtgaggggctgaggccatgttcagcctggtgagaagccactgaggcccacgggaagctacaggcagctttgagaagggggccccacaagtgggtgtatgttttggaaagtgtcaggctggattttcaggggacagcagagggcacctcagggatcagtgaggaggtgattgcgctcacgtcctggaaaagcgcccagggccaggggctggggaagctggttccgatgcagagaggtgggcgggttcaagagctgattccagggtaaaggcctaagagtcgaatctgggttgagcctttgctgtccctcctgcccaccccactgaccctgcttgtacgtttcttcctgtgcaggaaggatgcctgtggccctcggagagcacagtgtcaggcaacggaatcccagaggtgagacctccctcggcctcccctccaacacccccatcccaccctgggctgctcccgctgcggctggaacagtgtgggctgctaaaggctcacccctccgccctcctctgcagtgcccttgctgctgggatcctccttgccggagatcatctgctccctgcccctgagggagcagcccagctctctgctctctgcacacgggagcacggacgctgccactgtttggaggagggcggtgcagctctgcagtgctgccccccaggccagggcccccgcgggatcaggctctgggctcccgcccccgccagccctgctgccctctccctttccccagagagccaagtcccatgcagcagaactccagtctcaggatcgcttctggacaacccacctgagacagccgccctccctcactcccgctctgcttcctccagccgcaggtctacgccccgcctcggcccaccgaccgcctggccgtgccgcccttcgcccagcgggagcgcttccaccgcttccagcccacctatccgtacctgcagcacgagatcgacctgccacccaccatctcgctgtcagacggggaggagcccccaccctaccagggcccctgcaccctccagcttcgggaccccgagcagcagctggaactgaaccgggagtcggtgcgcgcacccccaaacagaaccatcttcgacagtgacctgatggatagtgccaggctgggcggcccctgcccccccagcagtaactcgggcatcagcgccacgtgctacggcagcggcgggcgcatggaggggccgccgcccacctacagcgaggtcatcggccactacccggggtcctccttccagcaccagcagagcagtgggccgccctccttgctggaggggacccggctccaccacacacacatcgcgcccctagagagcgcagccatctggagcaaagagaaggataaacagaaaggacaccctctctagggtccccaggggggccgggctggggctgcgtaggtgaaaaggcagaacactccgcgcttcttagaagaggagtgagaggaaggcggggggcgcagcaacgcatcgtgtggccctcccctcccacctccctgtgtataaatatttacatgtgatgtctggtctgaatgcacaagctaagagagcttgcaaaaaaaaaaagaaaaaagaaaaaaaaaaaccacgtttctttgttgagctgtgtcttgaaggcaaaagaaaaaaaatttctacagtagtctttcttgtttctagttgagctgcgtgcgtgaatgcttattttcttttgtttatgataatttcacttaactttaaagacatatttgcacaaaacctttgtttaaagatctgcaatattatatatataaatatatataagataagagaaactgtatgtgcgagggcaggagtatttttgtattagaagaggcctattaaaaaaaaaagttgttttctgaactagaagaggaaaaaaatggcaatttttgagtgccaagtcagaaagtgtgtattaccttgtaaagaaaaaaattacaaagcaggggtttagagttatttatataaatgttgagattttgcactattttttaatataaatatgtcagtgcttgcttgatggaaacttctcttgtgtctgttgagactttaagggagaaatgtcggaatttcagagtcgcctgacggcagagggtgagcccccgtggagtctgcagagaggccttggccaggagcggcgggctttcccgaggggccactgtccctgcagagtggatgcttctgcctagtgacaggttatcaccacgttatatattccctaccgaaggagacaccttttcccccctgacccagaacagcctttaaatcacaagcaaaataggaaagttaaccacggaggcaccgagttccaggtagtggttttgcctttcccaaaaatgaaaataaactgttaccgaaggaattagtttttcctcttcttttttccaactgtgaaggtccccgtggggtggagcatggtgcccctcacaagccgcagcggctggtgcccgggctaccagggacatgccagagggctcgatgacttgtctctgcagggcgctttggtggttgttcagctggctaaaggttcaccggtgaaggcaggtgcggtaactgccgcactggaccctaggaagccccaggtattcgcaatctgacctcctcctgtctgtttcccttcacggatcaattctcacttaagaggccaataaacaacccaacatgaaaaggtgacaagcctgggtttctcccaggataggtgaaagggttaaaatgagtaaagcagttgagcaaacaccaacccgagcttcgggcgcagaattcttcaccttctcttcccctttccatctcctttccccgcggaaacaacgcttcccttctggtgtgtctgttgatctgtgttttcatttacatctctcttagactccgctcttgttctccaggttttcaccagatagatttggggttggcgggacctgctggtgacgtgcaggtgaaggacaggaaggggcatgtgagcgtaaatagaggtgaccagaggagagcatgaggggtggggctttgggacccaccggggccagtggctggagcttgacgtctttcctccccatgggggtgggagggcccccagctggaagagcagactcccagctgctaccccctcccttcccatgggagtggctttccattttgggcagaatgctgactagtagactaacataaaagatataaaaggcaataactattgtttgtgagcaacttttttataacttccaaaacaaaaacctgagcacagttttgaagttctagccactcgagctcatgcatgtgaaacgtgtgctttacgaaggtggcagctgacagacgtgggctctgcatgccgccagcctagtagaaagttctcgttcattggcaacagcagaacctgcctctccgtgaagtcgtcagcctaaaatttgtttctctcttgaagaggattctttgaaaaggtcctgcagagaaatcagtacaggttatcccgaaaggtacaaggacgcacttgtaaagatgattaaaacgtatctttcctttatgtgacgcgtctctagtgccttactgaagaagcagtgacactcccgtcgctcggtgaggacgttcccggacagtgcctcactcacctgggactggtatcccctcccagggtccaccaagggctcctgcttttcagacaccccatcatcctcgcgcgtcctcaccctgtctctaccagggaggtgcctagcttggtgaggttactcctgctcctccaacctttttttgccaaggtttgtacacgactcccatctaggctgaaaacctagaagtggaccttgtgtgtgtgcatggtgtcagcccaaagccaggctgagacagtcctcatatcctcttgagccaaactgtttgggtctcgttgcttcatggtatggtctggatttgtgggaatggctttgcgtgagaaaggggaggagagtggttgctgccctcagccggcttgaggacagagcctgtccctctcatgacaactcagtgttgaagcccagtgtcctcagcttcatgtccagtggatggcagaagttcatggggtagtggcctctcaaaggctgggcgcatcccaagacagccagcaggttgtctctggaaacgaccagagttaagctctcggcttctctgctgagggtgcaccctttcctctagatggtagttgtcacgttatctttgaaaactcttggactgctcctgaggaggccctcttttccagtaggaagttagatgggggttctcagaagtggctgattggaaggggacaagcttcgtttcaggggtctgccgttccatcctggttcagagaaggccgagcgtggctttctctagccttgtcactgtctccctgcctgtcaatcaccacctttcctccagaggaggaaaattatctcccctgcaaagcccggttctacacagatttcacaaattgtgctaagaaccgtccgtgttctcagaaagcccagtgtttttgcaaagaatgaaaagggaccccatatgtagcaaaaatcagggctgggggagagccgggttcattccctgtcctcattggtcgtccctatgaattgtacgtttcagagaaattttttttcctatgtgcaacacgaagcttccagaaccataaaatatcccgtcgataaggaaagaaaatgtcgttgttgttgtttttctggaaactgcttgaaatcttgctgtactatagagctcagaaggacacagcccgtcctcccctgcctgcctgattccatggctgttgtgctgattccaatgctttcacgttggttcctggcgtgggaactgctctcctttgcagccccatttcccaagctctgttcaagttaaacttatgtaagctttccgtggcatgcggggcgcgcacccacgtccccgctgcgtaagactctgtatttggatgccaatccacaggcctgaagaaactgcttgttgtgtatcagtaatcattagtggcaatgatgacattctgaaaagctgcaatacttatacaataaattttacaattctttggaatgag
